(19) United States
(12) Patent Application Publication
(10) Pub. No.: US 2021/0139912 A1
(43) Pub. Date: May 13, 2021

(54) RNAI CONSTRUCTS FOR INHIBITING PNPLA3 EXPRESSION AND METHODS OF USE THEREOF

(71) Applicant: AMGEN INC., Thousand Oaks, CA (US)

(72) Inventors: Ingrid RULIFSON, Palo Alto, CA (US); Justin K. MURRAY, Moorpark, CA (US); Michael OLLMANN, San Carlos, CA (US); Oliver HOMANN, Berkeley, CA (US)

(73) Assignee: AMGEN INC., Thousand Oaks, CA (US)

(21) Appl. No.: 16/771,907

(22) PCT Filed: Dec. 12, 2018
(86) PCT No.: PCT/US2018/065275

§ 371 Date: Jun. 11, 2020

Related U.S. Application Data
(60) Provisional application No. 62/597,841, filed on Dec. 12, 2017.

(51) Int. Cl. C12N 15/113; A61K 31/7105

(52) U.S. Cl. CPC C12N 15/1137; A61K 31/7105; C12N 2310/14; C12Y 301/01003; C12N 2310/321; C12N 2310/322; C12N 2310/315

(57) ABSTRACT

The present invention relates to RNAi constructs for reducing expression of the PNPLA3 gene. Methods of using such RNAi constructs to treat or prevent liver disease, nonalcoholic fatty liver disease (NAFLD) are also described.

### RELATED APPLICATIONS

[0001] This application claims priority to U.S. Provisional Patent Application No. 62/597,841, filed Dec. 12, 2017, the contents of which are incorporated herein by reference.

### SEQUENCE LISTING

[0002] The present application contains a Sequence Listing which has been submitted electronically in ASCII format and is hereby incorporated by reference in its entirety. Said ASCII copy, created on Dec. 12, 2018, is named A-2219-WO-PCT_SL.txt and is 708,961 bytes in size. The information in the electronic format of the sequence listing is incorporated herein by reference in its entirety.

### FIELD OF THE INVENTION

[0003] The present invention relates to compositions and methods for modulating liver expression of patatin-like phospholipase domain-containing 3 (PNPLA3), In particular, the present invention relates to nucleic acid-based therapeutics for reducing PNPLA3 expression via RNA interference and methods of using such nucleic acid-based therapeutics to treat or prevent liver disease, such as nonalcoholic fatty liver disease (NAFLD).

[0004] The instant application contains a Sequence Listing which has been submitted electronically in ASCII format and is hereby incorporated by reference in its entirety. Said ASCII copy, created on Dec. 12, 2018, is named A-2219-WO-PCT_SL.txt and is 708,961 bytes in size.

### BACKGROUND OF THE INVENTION

[0005] Comprising a spectrum of hepatic pathologies, nonalcoholic fatty liver disease (NAFLD) is the most common chronic liver disease in the world, the prevalence of which doubled in the last 20 years and now is estimated to affect approximately 20% of the world population (Sattar et al. (2014) BMJ 349:g4596; Loomba and Sanyal (2013) Nature Reviews Gastroenterology & hepatology 10(11):686-690; Kim and Kim (2017) Clin Gastroenterol Hepatol 15(4):474-485; Petta et al. (2016) Dig Liver Dis 48(3):333-342). NAFLD begins with the accumulation of triglyceride in the liver and is defined by the presence of cytoplasmic lipid droplets in more than 5% of hepatocytes in an individual 1) without a history of significant alcohol consumption and 2) in which the diagnosis of other types of liver disease have been excluded (Zhu et al (2016) World J Gastroenterol 22(36):8226-33; Rinella (2015) JAMA 313(22):2263-73; Yki-Jarvinen (2016) Diabetologia 59(6):1104-11). In some individuals the accumulation of ectopic fat in the liver, called steatosis, triggers inflammation and hepatocellular injury leading to a more advanced stage of disease called, nonalcoholic steatohepatitis (NASH) (Rinella, supra). As of 2015, 75-100 million Americans are predicted to have NAFLD; NASH accounting for approximately 10-30% of NAFLD diagnoses (Rinella, supra; Younossi et al (2016) Hepatology 64(5): 1577-1586).

[0006] Patatin-like phospholipase domain-containing 3 (PNPLA3), formerly known as adiponutrin (ADPN) and calcium-independent phospholipase A2-epsilon (iPLA(2)ε), is a type II transmembrane protein (Wilson et al (2006) J Lipid Res 47(9):1940-9; Jenkins et al (2004) J Biol Chem 279(47):48968-75). Initially identified in adipose cells as a membrane-associated, adipose-enriched protein induced during adipogenesis in mice, it is now well characterized to be expressed in other tissues, including the liver (Wilson et al, supra; Baulande et al (2001) J Biol Chem 276(36):33336-44; Moldes et al. (2006) Eur J Endocrinol 155(3):461-8; Faraj et al. (2006) J Endocrinol 191(2):427-35; Liu et al (2004) J Clin Endocrinol Metab 89(6):2684-9; Lake et al (2005) J Lipid Res 46(11):2477-87). In cell-free biochemical systems, recombinant PNPLA3 protein can exhibit either triacylglycerol lipase or transacylation activity (Jenkins et al., supra; Kumari et al (2012) Cell Metab 15(5):691-702; He et al (2010) J Biol Chem 285(9):6706-15). In hepatocytes, PNPLA3 is expressed on the endoplasmic reticulum and lipid membranes and predominantly exhibits triacylglycerol hydrolase activity (He et al., supra; Huang et al (2010) Proc Natl Acad Sci USA 107(17):7892-7; Ruhanen et al (2014) J Lipid Res 55(4):739-46; Pingitore et al. (2014) Biochim Biophys Acta 1841(4):574-80). Although lacking a secretory signal, data indicates PNPLA3 is secreted and can be found in human plasma as disulfide-bond dependent multimers (Winberg et al. (2014) Biochem Biophys Res Commun 446(4):1114-9). Accordingly, novel therapeutics targeting PNPLA3 function represents a novel approach to reducing PNPLA3 levels and treating hepatologic diseases, such as nonalcoholic fatty liver disease.

### SUMMARY OF THE INVENTION

[0007] The present invention is based, in part, on the design and generation of RNAi constructs that target the PNPLA3 gene and reduce expression of PNPLA3 in liver cells. The sequence specific inhibition of PNPLA3 expression is useful for treating or preventing conditions associated with PNPLA3 expression, such as liver-related diseases, such as, for example, simple fatty liver (steatosis), nonalcoholic steatohepatitis (NASH), cirrhosis (irreversible, advanced scarring of the liver), or PNPLA3 related obesity. Accordingly, in one embodiment, the present invention provides an RNAi construct comprising a sense strand and an antisense strand, wherein the antisense strand comprises a region having a sequence that is complementary to a PNPLA3 mRNA sequence. In certain embodiments, the antisense strand comprises a region having at least 15 contiguous nucleotides from an antisense sequence listed in Table 1 or Table 2. In some embodiments, the RNAi of the present invention selectively inhibits PNPLA3-rs738409, PNPLA3-rs738408, and/or PNPLA3-rs738409-rs738408 minor alleles over the reference allele which does not contain these changes.

[0008] In some embodiments, the sense strand of the RNAi constructs described herein comprises a sequence that is sufficiently complementary to the sequence of the antisense strand to form a duplex region of about 15 to about 30 base pairs in length. In these and other embodiments, the sense and antisense strands each are about 15 to about 30 nucleotides in length. In some embodiments, the RNAi constructs comprise at least one blunt end. In other embodiments, the RNAi constructs comprise at least one nucleotide overhang. Such nucleotide overhangs may comprise at least 1 to 6 unpaired nucleotides and can be located at the 3′ end of the sense strand, the 3′ end of the antisense strand, or the 3′ end of both the sense and antisense strand. In certain embodiments, the RNAi constructs comprise an overhang of two unpaired nucleotides at the 3′ end of the sense strand and the 3′ end of the antisense strand. In other embodiments, the RNAi constructs comprise an overhang of two unpaired nucleotides at the 3′ end of the antisense strand and a blunt end of the 3′ end of the sense strand/5′ end of the antisense strand.

[0009] The RNAi constructs of the invention may comprise one or more modified nucleotides, including nucleotides having modifications to the ribose ring, nucleobase, or phosphodiester backbone. In some embodiments, the RNAi constructs comprise one or more 2′-modified nucleotides. Such 2′-modified nucleotides can include 2′-fluoro modified nucleotides, 2′-O-methyl modified nucleotides, 2′-O-methoxyethyl modified nucleotides, 2′-O-allyl modified nucleotides, bicyclic nucleic acids (BNA), glycol nucleic acids (GNAs), inverted bases (e.g. inverted adenosine) or combinations thereof. In one particular embodiment, the RNAi constructs comprise one or more 2′-fluoro modified nucleotides, 2′-O-methyl modified nucleotides, or combinations thereof. In some embodiments, all of the nucleotides in the sense and antisense strand of the RNAi construct are modified nucleotides.

[0010] In some embodiments, the RNAi constructs comprise at least one backbone modification, such as a modified internucleotide or internucleoside linkage. In certain embodiments, the RNAi constructs described herein comprise at least one phosphorothioate internucleotide linkage. In particular embodiments, the phosphorothioate internucleotide linkages may be positioned at the 3′ or 5′ ends of the sense and/or antisense strands.

[0011] In some embodiments, the antisense strand and/or the sense strand of the RNAi constructs of the invention may comprise or consist of a sequence from the antisense and sense sequences listed in Tables 1 or 2. In certain embodiments, the RNAi construct may be any one of the duplex compounds listed in any one of Tables 1 to 2.

### BRIEF DESCRIPTION OF THE FIGURES

[0012] FIG. 1A-D show screening of five siRNA molecules for both dose-dependent mRNA knockdown and functional durability in vivo.

[0013] FIG. 2A-G shows effect of PNPLA3 siRNA molecules in vivo in mice, liver weight, confirmation of human PNPLA3 expression, hepatic triglyceride content, serum TIMP1 levels, and histological indication of steatosis or inflammation.

[0014] FIG. 3A-G shows effect of PNPLA3 siRNA molecules in vivo, liver weight, confirmation of human PNPLA3 expression, hepatic triglyceride content, serum TIMP1 levels, and histological indication of steatosis or inflammation.

[0015] FIG. 4A-D shows the ability of a PNPLA3^{rs738409-rs738408}-specific siRNA molecule to rescue disease-associated phenotypes due to overexpression of PNPLA3^{rs738409-rs738408}, hepatic triglyceride content, serum TIMP1 levels, and histological indication of steatosis or inflammation.

[0016] FIG. 5A-L shows the ability of a PNPLA3^{rs738409-rs738408}-specific siRNA molecule to prevent the development of early fibrosis.

### DETAILED DESCRIPTION OF THE INVENTION

[0017] The present invention is directed to compositions and methods for regulating the expression of the Patatin-Like Phospholipase Domain Containing 3 (PNPLA3) gene. In some embodiments, the gene may be within a cell or subject, such as a mammal (e.g. a human). In some embodiments, compositions of the invention comprise RNAi constructs that target a PNPLA3 mRNA and reduce PNPLA3 expression in a cell or mammal. Such RNAi constructs are useful for treating or preventing various forms of liver-related diseases, such as, for example, simple fatty liver (steatosis), nonalcoholic steatohepatitis (NASH), cirrhosis (irreversible, advanced scarring of the liver), or PNPLA3 related obesity.

[0018] In 2008, a genome wide association study (GWAS) exploring nonsynomonous sequence variations, or single nucleotide polymorphisms (SNPs), associated with NAFLD identified a variant in PNPLA3, (rs738409[G], encoding I148M; which can be referred to as PNPLA3-rs738409, PNPLA3-ma or PNPLA3-minor allele), as significantly associated with hepatic fat content. Since this initial report, subsequent GWAS confirm PNPLA3 rs738409 as the major genetic determinant of NAFLD, significantly associated with 1) increased levels of the serum biomarker for liver damage, alanine transaminase (ALT), 2) NAFLD incidence, progression and severity, 3) both obese and lean individuals, and 4) the only known SNP shown to be significantly associated with all stages of NAFLD: steatosis, NASH, cirrhosis and hepatic cell carcinoma. The consensus among numerous GWAS indicate the association of PNPLA3 rs738409 with NAFLD is independent of age, gender, ethnicity, metabolic syndrome, body mass index, insulin resistance, and serum lipids. Furthermore, statistical analyses from multiple sources estimate approximately 50% of NAFLD patients carry the PNPLA3 rs738409 mutation. Patients can be homozygous or heterozygous for the PNPLA3 rs738409 mutation. Additionally, it has been discovered that patients having the PNPLA3 rs738409 mutation often also carry an rs738408 mutation 3 base pairs away (Tian et al (2010) Nature Genetics 42:21-23). Thus, a patient can have a PNPLA3-rs738409 minor allele, PNPLA3-rs738408 minor allele or PNPLA3-rs738409-rs738408 double minor allele mutation (PNPLA3-dma).

[0019] Investigators have developed mouse models for exploring PNPLA3 function in vivo. To date, no detectable metabolic phenotype has been identified as the result of Pnpla3-deficiency or Pnpla3 over-expression. In contrast, expression of Pnpla3^{I148M} in both transgenic mice and knock-in mice, led to increased hepatic triglyceride levels akin to NAFLD Thus, combined, the in vivo mouse model data points to expression of the mutant Pnpla3^{I148M} protein, and not over-expression of the wild type protein, as the driver of the disease phenotype. These findings, in addition to the high frequency of the minor allele in NAFLD-affected individuals and prevailing association with the disease, underline PNPLA3 rs738409 as a prime therapeutic target for NAFLD.

[0020] RNA interference (RNAi) is the process of introducing exogeneous RNA into a cell leading to specific degradation of the mRNA encoding the targeted protein with a resultant decrease in protein expression. Advances in both the RNAi technology and hepatic delivery and growing positive outcomes with other RNAi-based therapies, suggest RNAi as a compelling means to therapeutically treat NAFLD by directly targeting PNPLA3I148M. Numerous GWAS indicate a dose-dependent effect of PNPLA3 rs738409 on NAFLD incidence, progression and severity (GWAS); the odds ratio tending to be double, if not more, for homozygote carriers versus heterozygote carriers, yet still at least two-fold more for heterozygotes versus wild type individuals. Thus, silencing PNPLA3 employing allelic discrimination specificity could be both a potential means to reduce hepatic triglyceride in PNPLA3I148M carriers, but also present a scenario in which heterozygotes may gain benefit without silencing of the wild type allele. Along these lines, we identified SNP-specific short interfering RNAs (siRNA) to PNPLA3I148M and demonstrate proof of concept in vitro. Using both hepatoma cell lines, Hep3B (homozygous for the reference allele, PNPLA3I148I) and HEPG2 (homozygous for the minor allele, PNPLA3I148M), we identified siRNA sequences capable of inhibiting specifically PNPLA3I148M gene expression. The inhibitory effect of these sequences were confirmed by screening on Chinese hamster ovary (CHO) cells over-expressing either PNPLA31148I or PNPLA3I148M. Using adeno-associated virus (AAV) to overexpress human PNPLA3I148M in vivo, we then demonstrated treatment with minor allele-specific SNPs not only specifically reduced human PNPLA3I148M expression in mice, but also significantly reversed hepatic triglyceride accumulation induced by over-expression of human PNPLA3I148M.

[0021] As used herein, the term “RNAi construct” refers to an agent comprising a RNA molecule that is capable of downregulating expression of a target gene (e.g. PNPLA3) via a RNA interference mechanism when introduced into a cell. RNA interference is the process by which a nucleic acid molecule induces the cleavage and degradation of a target RNA molecule (e.g. messenger RNA or mRNA molecule) in a sequence-specific manner, e.g. through a RNA induced silencing complex (RISC) pathway. In some embodiments, the RNAi construct comprises a double-stranded RNA molecule comprising two antiparallel strands of contiguous nucleotides that are sufficiently complementary to each other to hybridize to form a duplex region. “Hybridize” or “hybridization” refers to the pairing of complementary polynucleotides, typically via hydrogen bonding (e.g. Watson-Crick, Hoogsteen or reversed Hoogsteen hydrogen bonding) between complementary bases in the two polynucleotides. The strand comprising a region having a sequence that is substantially complementary to a target sequence (e.g. target mRNA) is referred to as the “antisense strand.” The “sense strand” refers to the strand that includes a region that is substantially complementary to a region of the antisense strand. In some embodiments, the sense strand may comprise a region that has a sequence that is substantially identical to the target sequence.

[0022] In some embodiments, the invention is an RNAi directed to PNPLA3. In some embodiments, the invention is an RNAi that binds at the PNPLA3 rs738409 site. In some embodiments, the invention is an RNAi that binds at the PNPLA3 rs738408 site. In some embodiments, the invention is an RNAi that binds at both the PNPLA3 rs738409 rs738408 sites. In some embodiments, the invention is an RNAi that preferentially binds PNPLA3 rs738409 over the native PNPLA3 sequence (PNPLA3-ref). In some embodiments, the invention is an RNAi that preferentially binds PNPLA3 rs738408 over the PNPLA3-ref sequence. In some embodiments, the invention is an RNAi that preferentially binds PNPLA3-dma over PNPLA3-ma. In some embodiments, the invention in an RNAi molecule that contains any of the sequences found in Table 1 or 2.

[0023] A double-stranded RNA molecule may include chemical modifications to ribonucleotides, including modifications to the ribose sugar, base, or backbone components of the ribonucleotides, such as those described herein or known in the art. Any such modifications, as used in a double-stranded RNA molecule (e.g. siRNA, shRNA, or the like), are encompassed by the term “double-stranded RNA” for the purposes of this disclosure.

[0024] As used herein, a first sequence is “complementary” to a second sequence if a polynucleotide comprising the first sequence can hybridize to a polynucleotide comprising the second sequence to form a duplex region under certain conditions, such as physiological conditions. Other such conditions can include moderate or stringent hybridization conditions, which are known to those of skill in the art. A first sequence is considered to be fully complementary (100% complementary) to a second sequence if a polynucleotide comprising the first sequence base pairs with a polynucleotide comprising the second sequence over the entire length of one or both nucleotide sequences without any mismatches. A sequence is “substantially complementary” to a target sequence if the sequence is at least about 80%, 85%, 90%, 95%, 96%, 97%, 98%, 99% or 100% complementary to a target sequence. Percent complementarity can be calculated by dividing the number of bases in a first sequence that are complementary to bases at corresponding positions in a second or target sequence by the total length of the first sequence. A sequence may also be said to be substantially complementary to another sequence if there are no more than 5, 4, 3, 2, or 1 mismatches over a 30 base pair duplex region when the two sequences are hybridized. Generally, if any nucleotide overhangs, as defined herein, are present, the sequence of such overhangs is not considered in determining the degree of complementarity between two sequences. By way of example, a sense strand of 21 nucleotides in length and an antisense strand of 21 nucleotides in length that hybridize to form a 19 base pair duplex region with a 2 nucleotide overhang at the 3′ end of each strand would be considered to be fully complementary as the term is used herein.

[0025] In some embodiments, a region of the antisense strand comprises a sequence that is fully complementary to a region of the target RNA sequence (e.g. PNPLA3 mRNA). In such embodiments, the sense strand may comprise a sequence that is fully complementary to the sequence of the antisense strand. In other such embodiments, the sense strand may comprise a sequence that is substantially complementary to the sequence of the antisense strand, e.g. having 1, 2, 3, 4, or 5 mismatches in the duplex region formed by the sense and antisense strands. In certain embodiments, it is preferred that any mismatches occur within the terminal regions (e.g. within 6, 5, 4, 3, 2, or 1 nucleotides of the 5′ and/or 3′ ends of the strands). In one embodiment, any mismatches in the duplex region formed from the sense and antisense strands occur within 6, 5, 4, 3, 2, or 1 nucleotides of the 5′ end of the antisense strand.

[0026] In certain embodiments, the sense strand and antisense strand of the double-stranded RNA may be two separate molecules that hybridize to form a duplex region, but are otherwise unconnected. Such double-stranded RNA molecules formed from two separate strands are referred to as “small interfering RNAs” or “short interfering RNAs” (siRNAs). Thus, in some embodiments, the RNAi constructs of the invention comprise a siRNA.

[0027] Where the two substantially complementary strands of a dsRNA are comprised by separate RNA molecules, those molecules need not, but can be covalently connected. Where the two strands are connected covalently by means other than an uninterrupted chain of nucleotides between the 3 ‘-end of one strand and the 5’-end of the respective other strand forming the duplex structure, the connecting structure is referred to as a “linker.” The RNA strands may have the same or a different number of nucleotides. The maximum number of base pairs in the duplex is the number of nucleotides in the shortest strand of the dsRNA minus any overhangs that are present in the duplex. In addition to the duplex structure, an RNAi may comprise one or more nucleotide overhangs.

[0028] In other embodiments, the sense strand and the antisense strand that hybridize to form a duplex region may be part of a single RNA molecule, i.e. the sense and antisense strands are part of a self-complementary region of a single RNA molecule. In such cases, a single RNA molecule comprises a duplex region (also referred to as a stem region) and a loop region. The 3′ end of the sense strand is connected to the 5′ end of the antisense strand by a contiguous sequence of unpaired nucleotides, which will form the loop region. The loop region is typically of a sufficient length to allow the RNA molecule to fold back on itself such that the antisense strand can base pair with the sense strand to form the duplex or stem region. The loop region can comprise from about 3 to about 25, from about 5 to about 15, or from about 8 to about 12 unpaired nucleotides. Such RNA molecules with at least partially self-complementary regions are referred to as “short hairpin RNAs” (shRNAs). In some embodiments, the loop region can comprise at least 1, 2, 3, 4, 5, 10, 20, or 25 unpaired nucleotides. In some embodiments, the loop region can have 10, 9, 8, 7, 6, 5, 4, 3, 2, or fewer unpaired nucleotides. In certain embodiments, the RNAi constructs of the invention comprise a shRNA. The length of a single, at least partially self-complementary RNA molecule can be from about 35 nucleotides to about 100 nucleotides, from about 45 nucleotides to about 85 nucleotides, or from about 50 to about 60 nucleotides and comprise a duplex region and loop region each having the lengths recited herein.

[0029] In some embodiments, the RNAi constructs of the invention comprise a sense strand and an antisense strand, wherein the antisense strand comprises a region having a sequence that is substantially or fully complementary to a PNPLA3 messenger RNA (mRNA) sequence. As used herein, a “PNPLA3 mRNA sequence” refers to any messenger RNA sequence, including splice variants, encoding a PNPLA3 protein, including PNPLA3 protein variants or isoforms from any species (e.g. mouse, rat, non-human primate, human). PNPLA3 protein is also known as adiponutrin (ADPN) and calcium-independent phospholipase A2-epsilon (iPLA(2)□)).

[0030] A PNPLA3 mRNA sequence also includes the transcript sequence expressed as its complementary DNA (cDNA) sequence. A cDNA sequence refers to the sequence of an mRNA transcript expressed as DNA bases (e.g. guanine, adenine, thymine, and cytosine) rather than RNA bases (e.g. guanine, adenine, uracil, and cytosine). Thus, the antisense strand of the RNAi constructs of the invention may comprise a region having a sequence that is substantially or fully complementary to a target PNPLA3 mRNA sequence or PNPLA3 cDNA sequence. A PNPLA3 mRNA or cDNA sequence can include, but is not limited to, any PNPLA3 mRNA or cDNA sequence such as can be derived from the NCBI Reference sequence NM_025225.2.

[0031] A region of the antisense strand can be substantially complementary or fully complementary to at least 15 consecutive nucleotides of the PNPLA3 mRNA sequence. In some embodiments, the target region of the PNPLA3 mRNA sequence to which the antisense strand comprises a region of complementarity can range from about 15 to about 30 consecutive nucleotides, from about 16 to about 28 consecutive nucleotides, from about 18 to about 26 consecutive nucleotides, from about 17 to about 24 consecutive nucleotides, from about 19 to about 25 consecutive nucleotides, from about 19 to about 23 consecutive nucleotides, or from about 19 to about 21 consecutive nucleotides. In certain embodiments, the region of the antisense strand comprising a sequence that is substantially or fully complementary to a PNPLA3 mRNA sequence may, in some embodiments, comprise at least 15 contiguous nucleotides from an antisense sequence listed in Table 1 or Table 2. In other embodiments, the antisense sequence comprises at least 16, at least 17, at least 18, or at least 19 contiguous nucleotides from an antisense sequence listed in Table 1 or Table 2. In some embodiments, the sense and/or antisense sequence comprises at least 15 nucleotides from a sequence listed in Table 1 or 2 with no more than 1, 2, or 3 nucleotide mismatches.

[0032] The sense strand of the RNAi construct typically comprises a sequence that is sufficiently complementary to the sequence of the antisense strand such that the two strands hybridize under physiological conditions to form a duplex region. A “duplex region” refers to the region in two complementary or substantially complementary polynucleotides that form base pairs with one another, either by Watson-Crick base pairing or other hydrogen bonding interaction, to create a duplex between the two polynucleotides. The duplex region of the RNAi construct should be of sufficient length to allow the RNAi construct to enter the RNA interference pathway, e.g. by engaging the Dicer enzyme and/or the RISC complex. For instance, in some embodiments, the duplex region is about 15 to about 30 base pairs in length. Other lengths for the duplex region within this range are also suitable, such as about 15 to about 28 base pairs, about 15 to about 26 base pairs, about 15 to about 24 base pairs, about 15 to about 22 base pairs, about 17 to about 28 base pairs, about 17 to about 26 base pairs, about 17 to about 24 base pairs, about 17 to about 23 base pairs, about 17 to about 21 base pairs, about 19 to about 25 base pairs, about 19 to about 23 base pairs, or about 19 to about 21 base pairs. In one embodiment, the duplex region is about 17 to about 24 base pairs in length. In another embodiment, the duplex region is about 19 to about 21 base pairs in length.

[0033] In some embodiments, an RNAi agent of the invention contains a duplex region of about 24 to about 30 nucleotides that interacts with a target RNA sequence, e.g., an PNPLA3 target mRNA sequence, to direct the cleavage of the target RNA. Without wishing to be bound by theory, long double stranded RNA introduced into cells can be broken down into siRNA by a Type III endonuclease known as Dicer (Sharp et al. (2001) Genes Dev. 15:485). Dicer, a ribonuclease-III-like enzyme, 15 processes the dsRNA into 19-23 base pair short interfering RNAs with characteristic two base 3′ overhangs (Bernstein, et al., (2001) Nature 409:363). The siRNAs are then incorporated into an RNA-induced silencing complex (RISC) where one or more helicases unwind the siRNA duplex, enabling the complementary antisense strand to guide target recognition (Nykanen, et al., (2001) Cell 107:309). Upon binding to the appropriate target 20 mRNA, one or more endonucleases within the RISC cleave the target to induce silencing (Elbashir, et al., (2001) Genes Dev. 15: 188).

[0034] For embodiments in which the sense strand and antisense strand are two separate molecules (e.g. RNAi construct comprises a siRNA), the sense strand and antisense strand need not be the same length as the length of the duplex region. For instance, one or both strands maybe longer than the duplex region and have one or more unpaired nucleotides or mismatches flanking the duplex region. Thus, in some embodiments, the RNAi construct comprises at least one nucleotide overhang. As used herein, a “nucleotide overhang” refers to the unpaired nucleotide or nucleotides that extend beyond the duplex region at the terminal ends of the strands. Nucleotide overhangs are typically created when the 3′ end of one strand extends beyond the 5′ end of the other strand or when the 5′ end of one strand extends beyond the 3′ end of the other strand. The length of a nucleotide overhang is generally between 1 and 6 nucleotides, land 5 nucleotides, 1 and 4 nucleotides, 1 and 3 nucleotides, 2 and 6 nucleotides, 2 and 5 nucleotides, or 2 and 4 nucleotides. In some embodiments, the nucleotide overhang comprises 1, 2, 3, 4, 5, or 6 nucleotides. In one particular embodiment, the nucleotide overhang comprises 1 to 4 nucleotides. In certain embodiments, the nucleotide overhang comprises 2 nucleotides. The nucleotides in the overhang can be ribonucleotides, deoxyribonucleotides, or modified nucleotides as described herein. In some embodiments, the overhang comprises a 5′-uridineuridine-3′ (5′-UU-3′) dinucleotide. In such embodiments, the UU dinucleotide may comprise ribonucleotides or modified nucleotides, e.g. 2′-modified nucleotides. In other embodiments, the overhang comprises a 5′-deoxythymidine-deoxythymidine-3′ (5′-dTdT-3′) dinucleotide.

[0035] The nucleotide overhang can be at the 5′ end or 3′ end of one or both strands. For example, in one embodiment, the RNAi construct comprises a nucleotide overhang at the 5′ end and the 3′ end of the antisense strand. In another embodiment, the RNAi construct comprises a nucleotide overhang at the 5′ end and the 3′ end of the sense strand. In some embodiments, the RNAi construct comprises a nucleotide overhang at the 5′ end of the sense strand and the 5′ end of the antisense strand. In other embodiments, the RNAi construct comprises a nucleotide overhang at the 3′ end of the sense strand and the 3′ end of the antisense strand.

[0036] The RNAi constructs may comprise a single nucleotide overhang at one end of the double-stranded RNA molecule and a blunt end at the other. A “blunt end” means that the sense strand and antisense strand are fully base-paired at the end of the molecule and there are no unpaired nucleotides that extend beyond the duplex region. In some embodiments, the RNAi construct comprises a nucleotide overhang at the 3′ end of the sense strand and a blunt end at the 5′ end of the sense strand and 3′ end of the antisense strand. In other embodiments, the RNAi construct comprises a nucleotide overhang at the 3′ end of the antisense strand and a blunt end at the 5′ end of the antisense strand and the 3′ end of the sense strand. In certain embodiments, the RNAi construct comprises a blunt end at both ends of the double-stranded RNA molecule. In such embodiments, the sense strand and antisense strand have the same length and the duplex region is the same length as the sense and antisense strands (i.e. the molecule is double-stranded over its entire length).

[0037] The sense strand and antisense strand can each independently be about 15 to about 30 nucleotides in length, about 18 to about 28 nucleotides in length, about 19 to about 27 nucleotides in length, about 19 to about 25 nucleotides in length, about 19 to about 23 nucleotides in length, about 21 to about 25 nucleotides in length, or about 21 to about 23 nucleotides in length. In certain embodiments, the sense strand and antisense strand are each about 18, about 19, about 20, about 21, about 22, about 23, about 24, or about 25 nucleotides in length. In some embodiments, the sense strand and antisense strand have the same length but form a duplex region that is shorter than the strands such that the RNAi construct has two nucleotide overhangs. For instance, in one embodiment, the RNAi construct comprises (i) a sense strand and an antisense strand that are each 21 nucleotides in length, (ii) a duplex region that is 19 base pairs in length, and (iii) nucleotide overhangs of 2 unpaired nucleotides at both the 3′ end of the sense strand and the 3′ end of the antisense strand. In another embodiment, the RNAi construct comprises (i) a sense strand and an antisense strand that are each 23 nucleotides in length, (ii) a duplex region that is 21 base pairs in length, and (iii) nucleotide overhangs of 2 unpaired nucleotides at both the 3′ end of the sense strand and the 3′ end of the antisense strand. In other embodiments, the sense strand and antisense strand have the same length and form a duplex region over their entire length such that there are no nucleotide overhangs on either end of the double-stranded molecule. In one such embodiment, the RNAi construct is blunt ended and comprises (i) a sense strand and an antisense strand, each of which is 21 nucleotides in length, and (ii) a duplex region that is 21 base pairs in length. In another such embodiment, the RNAi construct is blunt ended and comprises (i) a sense strand and an antisense strand, each of which is 23 nucleotides in length, and (ii) a duplex region that is 23 base pairs in length.

[0038] In other embodiments, the sense strand or the antisense strand is longer than the other strand and the two strands form a duplex region having a length equal to that of the shorter strand such that the RNAi construct comprises at least one nucleotide overhang. For example, in one embodiment, the RNAi construct comprises (i) a sense strand that is 19 nucleotides in length, (ii) an antisense strand that is 21 nucleotides in length, (iii) a duplex region of 19 base pairs in length, and (iv) a single nucleotide overhang of 2 unpaired nucleotides at the 3′ end of the antisense strand. In another embodiment, the RNAi construct comprises (i) a sense strand that is 21 nucleotides in length, (ii) an antisense strand that is 23 nucleotides in length, (iii) a duplex region of 21 base pairs in length, and (iv) a single nucleotide overhang of 2 unpaired nucleotides at the 3′ end of the antisense strand.

[0039] The antisense strand of the RNAi constructs of the invention can comprise the sequence of any one of the antisense sequences listed in Table 1 or Table 2 or the sequence of nucleotides 1-19 of any of these antisense sequences. Each of the antisense sequences listed in Tables 1 and 6 comprises a sequence of 19 consecutive nucleotides (first 19 nucleotides counting from the 5′ end) that is complementary to a PNPLA3 mRNA sequence plus a two nucleotide overhang sequence. Thus, in some embodiments, the antisense strand comprises a sequence of nucleotides 1-19 of any one of SEQ ID NOs: 1-166 or 167-332.

### Modified Nucleotides

[0040] The RNAi constructs of the invention may comprise one or more modified nucleotides. A “modified nucleotide” refers to a nucleotide that has one or more chemical modifications to the nucleoside, nucleobase, pentose ring, or phosphate group. As used herein, modified nucleotides do not encompass ribonucleotides containing adenosine monophosphate, guanosine monophosphate, uridine monophosphate, and cytidine monophosphate, and deoxyribonucleotides containing deoxyadenosine monophosphate, deoxyguanosine monophosphate, deoxythymidine monophosphate, and deoxycytidine monophosphate. However, the RNAi constructs may comprise combinations of modified nucleotides, ribonucleotides, and deoxyribonucleotides. Incorporation of modified nucleotides into one or both strands of double-stranded RNA molecules can improve the in vivo stability of the RNA molecules, e.g., by reducing the molecules' susceptibility to nucleases and other degradation processes. The potency of RNAi constructs for reducing expression of the target gene can also be enhanced by incorporation of modified nucleotides.

[0041] In certain embodiments, the modified nucleotides have a modification of the ribose sugar. These sugar modifications can include modifications at the 2′ and/or 5′ position of the pentose ring as well as bicyclic sugar modifications. A 2′-modified nucleotide refers to a nucleotide having a pentose ring with a substituent at the 2′ position other than H or OH. Such 2′ modifications include, but are not limited to, 2′-O-alkyl (e.g. O—C1-C10 or O—C1-C10 substituted alkyl), 2′-O-allyl (O—CH2CH═CH2), 2′-C-allyl, 2′-fluoro, 2′-O-methyl (OCH3), 2′-O-methoxyethyl (O—(CH2)2OCH3), 2′-OCF3, 2′-O(CH2)2SCH3, 2′-O-aminoalkyl, 2′-amino (e.g. NH2), 2′-O-ethylamine, and 2′-azido. Modifications at the 5′ position of the pentose ring include, but are not limited to, 5′-methyl (R or S); 5′-vinyl, and 5′-methoxy.

[0042] A “bicyclic sugar modification” refers to a modification of the pentose ring where a bridge connects two atoms of the ring to form a second ring resulting in a bicyclic sugar structure. In some embodiments the bicyclic sugar modification comprises a bridge between the 4′ and 2′ carbons of the pentose ring. Nucleotides comprising a sugar moiety with a bicyclic sugar modification are referred to herein as bicyclic nucleic acids or BNAs. Exemplary bicyclic sugar modifications include, but are not limited to, □-L-Methyleneoxy (4′-CH2-O-2′) bicyclicnucleic acid (BNA); □-D-Methyleneoxy (4′-CH2-O-2′) BNA (also referred to as a locked nucleic acid or LNA); Ethyleneoxy (4′-(CH2)2-O-2′) BNA; Aminooxy (4′-CH2-O—N(R)-2′)BNA; Oxyamino (4′-CH2-N(R)—O-2′) BNA; Methyl(methyleneoxy) (4′-CH(CH3)-O-2′) BNA (also referred to as constrained ethyl or cEt); methylene-thio (4′-CH2-S-2′) BNA; methylene-amino (4′-CH2-N(R)-2′) BNA; methyl carbocyclic (4′-CH2-CH(CH3)-2′) BNA; propylene carbocyclic (4′-(CH2)3-2′) BNA; and Methoxy(ethyleneoxy) (4′-CH(CH2OMe)-O-2′) BNA (also referred to as constrained MOE or cMOE). These and other sugar-modified nucleotides that can be incorporated into the RNAi constructs of the invention are described in U.S. Pat. No. 9,181,551, U.S. Patent Publication No. 2016/0122761, and Deleavey and Damha, Chemistry and Biology, Vol. 19: 937-954, 2012, all of which are hereby incorporated by reference in their entireties.

[0043] In some embodiments, the RNAi constructs comprise one or more 2′-fluoro modified nucleotides, 2′-O-methyl modified nucleotides, 2′-O-methoxyethyl modified nucleotides, 2′-O-allyl modified nucleotides, bicyclic nucleic acids (BNAs), or combinations thereof. In certain embodiments, the RNAi constructs comprise one or more 2′-fluoro modified nucleotides, 2′-O-methyl modified nucleotides, 2′-O-methoxyethyl modified nucleotides, or combinations thereof. In one particular embodiment, the RNAi constructs comprise one or more 2′-fluoro modified nucleotides, 2′-O-methyl modified nucleotides or combinations thereof.

[0044] Both the sense and antisense strands of the RNAi constructs can comprise one or multiple modified nucleotides. For instance, in some embodiments, the sense strand comprises 1, 2, 3, 4, 5, 6, 7, 8, 9, 10 or more modified nucleotides. In certain embodiments, all nucleotides in the sense strand are modified nucleotides. In some embodiments, the antisense strand comprises 1, 2, 3, 4, 5, 6, 7, 8, 9, 10 or more modified nucleotides. In other embodiments, all nucleotides in the antisense strand are modified nucleotides. In certain other embodiments, all nucleotides in the sense strand and all nucleotides in the antisense strand are modified nucleotides. In these and other embodiments, the modified nucleotides can be 2′-fluoro modified nucleotides, 2′-O-methyl modified nucleotides, or combinations thereof.

[0045] In some embodiments, all pyrimidine nucleotides preceding an adenosine nucleotide in the sense strand, antisense strand, or both strands are modified nucleotides. For example, where the sequence 5′-CA-3′ or 5′-UA-3′ appears in either strand, the cytidine and uridine nucleotides are modified nucleotides, preferably 2′-O-methyl modified nucleotides. In certain embodiments, all pyrimidine nucleotides in the sense strand are modified nucleotides (e.g. 2′-O-methyl modified nucleotides), and the 5′ nucleotide in all occurrences of the sequence 5′-CA-3′ or 5′-UA-3′ in the antisense strand are modified nucleotides (e.g. 2′-O-methyl modified nucleotides). In other embodiments, all nucleotides in the duplex region are modified nucleotides. In such embodiments, the modified nucleotides are preferably 2′-O-methyl modified nucleotides, 2′-fluoro modified nucleotides or combinations thereof.

[0046] In embodiments in which the RNAi construct comprises a nucleotide overhang, the nucleotides in the overhang can be ribonucleotides, deoxyribonucleotides, or modified nucleotides. In one embodiment, the nucleotides in the overhang are deoxyribonucleotides, e.g., deoxythymidine. In another embodiment, the nucleotides in the overhang are modified nucleotides. For instance, in some embodiments, the nucleotides in the overhang are 2′-O-methyl modified nucleotides, 2′-fluoro modified nucleotides, 2′-methoxyethyl modified nucleotides, or combinations thereof.

[0047] The RNAi constructs of the invention may also comprise one or more modified internucleotide linkages. As used herein, the term “modified internucleotide linkage” refers to an internucleotide linkage other than the natural 3′ to 5′ phosphodiester linkage. In some embodiments, the modified internucleotide linkage is a phosphorous-containing internucleotide linkage, such as a phosphotriester, aminoalkyl phosphotriester, an alkylphosphonate (e.g. methylphosphonate, 3′-alkylene phosphonate), a phosphinate, a phosphoramidate (e.g. 3′-aminophosphoramidate and aminoalkylphosphoramidate), a phosphorothioate (P═S), a chiralphosphorothioate, a phosphorodithioate, a thionophosphoramidate, a thionoalkylphosphonate, athionoalkylphosphotriester, and a boranophosphate. In one embodiment, a modified internucleotide linkage is a 2′ to 5′ phosphodiester linkage. In other embodiments, the modified internucleotide linkage is a non-phosphorous-containing internucleotide linkage and thus can be referred to as a modified internucleoside linkage. Such non-phosphorous-containing linkages include, but are not limited to, morpholino linkages (formed in part from the sugar portion of a nucleoside); siloxane linkages (—O—Si(H)2-O—); sulfide, sulfoxide and sulfone linkages; formacetyl and thioformacetyl linkages; alkene containing backbones; sulfamate backbones; methylenemethylimino (—CH2-N(CH3)-O—CH2-) and methylenehydrazino linkages; sulfonate and sulfonamide linkages; amide linkages; and others having mixed N, O, S and CH2 component parts. In one embodiment, the modified internucleoside linkage is a peptide-based linkage (e.g. aminoethylglycine) to create a peptide nucleic acid or PNA, such as those described in U.S. Pat. Nos. 5,539,082; 5,714,331; and 5,719,262. Other suitable modified internucleotide and internucleoside linkages that may be employed in the RNAi constructs of the invention are described in U.S. Pat. Nos. 6,693,187, 9,181,551, U.S. Patent Publication No. 2016/0122761, and Deleavey and Damha, Chemistry and Biology, Vol. 19: 937-954, 2012, all of which are hereby incorporated by reference in their entireties.

[0048] In certain embodiments, the RNAi constructs comprise one or more phosphorothioate internucleotide linkages. The phosphorothioate internucleotide linkages may be present in the sense strand, antisense strand, or both strands of the RNAi constructs. For instance, in some embodiments, the sense strand comprises 1, 2, 3, 4, 5, 6, 7, 8, or more phosphorothioate internucleotide linkages. In other embodiments, the antisense strand comprises 1, 2, 3, 4, 5, 6, 7, 8, or more phosphorothioate internucleotide linkages. In still other embodiments, both strands comprise 1, 2, 3, 4, 5, 6, 7, 8, or more phosphorothioate internucleotide linkages. The RNAi constructs can comprise one or more phosphorothioate internucleotide linkages at the 3′-end, the 5′-end, or both the 3′- and 5′-ends of the sense strand, the antisense strand, or both strands. For instance, in certain embodiments, the RNAi construct comprises about 1 to about 6 or more (e.g., about 1, 2, 3, 4, 5, 6 or more) consecutive phosphorothioate internucleotide linkages at the 3′-end of the sense strand, the antisense strand, or both strands. In other embodiments, the RNAi construct comprises about 1 to about 6 or more (e.g., about 1, 2, 3, 4, 5, 6 or more) consecutive phosphorothioate internucleotide linkages at the 5′-end of the sense strand, the antisense strand, or both strands. In one embodiment, the RNAi construct comprises a single phosphorothioate internucleotide linkage at the 3′ end of the sense strand and a single phosphorothioate internucleotide linkage at the 3′ end of the antisense strand. In another embodiment, the RNAi construct comprises two consecutive phosphorothioate internucleotide linkages at the 3′ end of the antisense strand (i.e. a phosphorothioate internucleotide linkage at the first and second internucleotide linkages at the 3′ end of the antisense strand). In another embodiment, the RNAi construct comprises two consecutive phosphorothioate internucleotide linkages at both the 3′ and 5′ ends of the antisense strand. In yet another embodiment, the RNAi construct comprises two consecutive phosphorothioate internucleotide linkages at both the 3′ and 5′ ends of the antisense strand and two consecutive phosphorothioate internucleotide linkages at the 5′ end of the sense strand. In still another embodiment, the RNAi construct comprises two consecutive phosphorothioate internucleotide linkages at both the 3′ and 5′ ends of the antisense strand and two consecutive phosphorothioate internucleotide linkages at both the 3′ and 5′ ends of the sense strand (i.e. a phosphorothioate internucleotide linkage at the first and second internucleotide linkages at both the 5′ and 3′ ends of the antisense strand and a phosphorothioate internucleotide linkage at the first and second internucleotide linkages at both the 5′ and 3′ ends of the sense strand). In any of the embodiments in which one or both strands comprises one or more phosphorothioate internucleotide linkages, the remaining internucleotide linkages within the strands can be the natural 3′ to 5′ phosphodiester linkages. For instance, in some embodiments, each internucleotide linkage of the sense and antisense strands is selected from phosphodiester and phosphorothioate, wherein at least one internucleotide linkage is a phosphorothioate.

[0049] In embodiments in which the RNAi construct comprises a nucleotide overhang, two or more of the unpaired nucleotides in the overhang can be connected by a phosphorothioate internucleotide linkage. In certain embodiments, all the unpaired nucleotides in a nucleotide overhang at the 3′ end of the antisense strand and/or the sense strand are connected by phosphorothioate internucleotide linkages. In other embodiments, all the unpaired nucleotides in a nucleotide overhang at the 5′ end of the antisense strand and/or the sense strand are connected by phosphorothioate internucleotide linkages. In still other embodiments, all the unpaired nucleotides in any nucleotide overhang are connected by phosphorothioate internucleotide linkages.

[0050] In certain embodiments, the modified nucleotides incorporated into one or both of the strands of the RNAi constructs of the invention have a modification of the nucleobase (also referred to herein as “base”). A “modified nucleobase” or “modified base” refers to a base other than the naturally occurring purine bases adenine (A) and guanine (G) and pyrimidine bases thymine (T), cytosine (C), and uracil (U). Modified nucleobases can be synthetic or naturally occurring modifications and include, but are not limited to, universal bases, 5-methylcytosine (5-me-C), 5-hydroxymethyl cytosine, xanthine (X), hypoxanthine (I), 2-aminoadenine, 6-methyladenine, 6-methylguanine, and other alkyl derivatives of adenine and guanine, 2-propyl and other alkyl derivatives of adenine and guanine, 2-thiouracil, 2-thiothymine and 2-thiocytosine, 5-halouracil and cytosine, 5-propynyl uracil and cytosine, 6-azo uracil, cytosine and thymine, 5-uracil (pseudouracil), 4-thiouracil, 8-halo, 8-amino, 8-thiol, 8-thioalkyl, 8-hydroxyl and other 8-substituted adenines and guanines, 5-halo, particularly 5-bromo, 5-trifluoromethyl and other 5-substituted uracils and cytosines, 7-methylguanine and 7-methyladenine, 8-azaguanine and 8-azaadenine, 7-deazaguanine and 7-daazaadenine and 3-deazaguanine and 3-deazaadenine.

[0051] In some embodiments, the modified base is a universal base. A “universal base” refers to a base analog that indiscriminately forms base pairs with all of the natural bases in RNA and DNA without altering the double helical structure of the resulting duplex region. Universal bases are known to those of skill in the art and include, but are not limited to, inosine, C-phenyl, C-naphthyl and other aromatic derivatives, azole carboxamides, and nitroazole derivatives, such as 3-nitropyrrol e, 4-nitroindole, 5-nitroindole, and 6-nitroindole.

[0052] Other suitable modified bases that can be incorporated into the RNAi constructs of the invention include those described in Herdewijn, Antisense Nucleic Acid Drug Dev., Vol. 10:297-310, 2000 and Peacock et al., J. Org. Chem., Vol. 76: 7295-7300, 2011, both of which are hereby incorporated by reference in their entireties. The skilled person is well aware that guanine, cytosine, adenine, thymine, and uracil may be replaced by other nucleobases, such as the modified nucleobases described above, without substantially altering the base pairing properties of a polynucleotide comprising a nucleotide bearing such replacement nucleobase.

[0053] In some embodiments of the RNAi constructs of the invention, the 5′ end of the sense strand, antisense strand, or both the antisense and sense strands comprises a phosphate moiety. As used herein, the term “phosphate moiety” refers to a terminal phosphate group that includes unmodified phosphates (—O—P═O)(OH)OH) as well as modified phosphates. Modified phosphates include phosphates in which one or more of the O and OH groups is replaced with H, O, S, N(R) or alkyl where R is H, an amino protecting group or unsubstituted or substituted alkyl. Exemplary phosphate moieties include, but are not limited to, 5′-monophosphate; 5′diphosphate; 5′-triphosphate; 5′-guanosine cap (7-methylated or non-methylated); 5′-adenosinecap or any other modified or unmodified nucleotide cap structure; 5′-monothiophosphate (phosphorothioate); 5′-monodithiophosphate (phosphorodithioate); 5′-alpha-thiotriphosphate; 5′-gamma-thiotriphosphate, 5′-phosphoramidates; 5′-vinylphosphates; 5′-alkylphosphonates (e.g., alkyl=methyl, ethyl, isopropyl, propyl, etc.); and 5′-alkyletherphosphonates (e.g., alkylether=methoxymethyl, ethoxymethyl, etc.).

[0054] The modified nucleotides that can be incorporated into the RNAi constructs of the invention may have more than one chemical modification described herein. For instance, the modified nucleotide may have a modification to the ribose sugar as well as a modification to the nucleobase. By way of example, a modified nucleotide may comprise a 2′ sugar modification (e.g. 2′-fluoro or 2′-methyl) and comprise a modified base (e.g. 5-methyl cytosine or pseudouracil). In other embodiments, the modified nucleotide may comprise a sugar modification in combination with a modification to the 5′ phosphate that would create a modified internucleotide or internucleoside linkage when the modified nucleotide was incorporated into a polynucleotide. For instance, in some embodiments, the modified nucleotide may comprise a sugar modification, such as a 2′-fluoro modification, a 2′-O-methyl modification, or a bicyclic sugar modification, as well as a 5′ phosphorothioate group. Accordingly, in some embodiments, one or both strands of the RNAi constructs of the invention comprise a combination of 2′ modified nucleotides or BNAs and phosphorothioate internucleotide linkages. In certain embodiments, both the sense and antisense strands of the RNAi constructs of the invention comprise a combination of 2′-fluoro modified nucleotides, 2′-O-methyl modified nucleotides, and phosphorothioate internucleotide linkages. Exemplary RNAi constructs comprising modified nucleotides and internucleotide linkages are shown in Table 2.

### Function of RNAi Constructs

[0055] Preferably, the RNAi constructs of the invention reduce or inhibit the expression of PNPLA3 in cells, particularly liver cells. Accordingly, in one embodiment, the present invention provides a method of reducing PNPLA3 expression in a cell by contacting the cell with any RNAi construct described herein. The cell may be in vitro or in vivo. PNPLA3 expression can be assessed by measuring the amount or level of PNPLA3 mRNA, PNPLA3 protein, or another biomarker linked to PNPLA3 expression. The reduction of PNPLA3 expression in cells or animals treated with an RNAi construct of the invention can be determined relative to the PNPLA3 expression in cells or animals not treated with the RNAi construct or treated with a control RNAi construct. For instance, in some embodiments, reduction of PNPLA3 expression is assessed by (a) measuring the amount or level of PNPLA3 mRNA in liver cells treated with a RNAi construct of the invention, (b) measuring the amount or level of PNPLA3 mRNA in liver cells treated with a control RNAi construct (e.g., RNAi agent directed to a RNA molecule not expressed in liver cells or a RNAi construct having a nonsense or scrambled sequence) or no construct, and (c) comparing the measured PNPLA3 mRNA levels from treated cells in (a) to the measured PNPLA3 mRNA levels from control cells in (b). The PNPLA3 mRNA levels in the treated cells and controls cells can be normalized to RNA levels for a control gene (e.g. 18S ribosomal RNA) prior to comparison. PNPLA3 mRNA levels can be measured by a variety of methods, including Northern blot analysis, nuclease protection assays, fluorescence in situ hybridization (FISH), reverse-transcriptase (RT)-PCR, real-time RT-PCR, quantitative PCR, and the like.

[0056] In other embodiments, reduction of PNPLA3 expression is assessed by (a) measuring the amount or level of PNPLA3 protein in liver cells treated with a RNAi construct of the invention, (b) measuring the amount or level of PNPLA3 protein in liver cells treated with a control RNAi construct (e.g. RNAi agent directed to a RNA molecule not expressed in liver cells or a RNAi construct having a nonsense or scrambled sequence) or no construct, and (c) comparing the measured PNPLA3 protein levels from treated cells in (a) to the measured PNPLA3 protein levels from control cells in (b). Methods of measuring PNPLA3 protein levels are known to those of skill in the art, and include Western Blots, immunoassays (e.g. ELISA), and flow cytometry. An exemplary immunoassay-based method for assessing PNPLA3 protein expression is described in Example 2. Example 3 describes an exemplary method for measuring PNPLA3 mRNA using RNA FISH. Any method capable of measuring PNPLA3 mRNA or protein can be used to assess the efficacy of the RNAi constructs of the invention.

[0057] In some embodiments, the methods to assess PNPLA3 expression levels are performed in vitro in cells that natively express PNPLA3 (e.g. liver cells) or cells that have been engineered to express PNPLA3. In certain embodiments, the methods are performed in vitro in liver cells. Suitable liver cells include, but are not limited to, primary hepatocytes (e.g. human, non-human primate, or rodent hepatocytes), HepAD38 cells, HuH-6 cells, HuH-7 cells, HuH-5-2 cells, BNLCL2 cells, Hep3B cells, or HepG2 cells. In one embodiment, the liver cells are Hep3B cells. In another embodiment, the liver cells are HepG2 cells.

[0058] In other embodiments, the methods to assess PNPLA3 expression levels are performed in vivo. The RNAi constructs and any control RNAi constructs can be administered to an animal (e.g. rodent or non-human primate) and PNPLA3 mRNA or protein levels assessed in liver tissue harvested from the animal following treatment. Alternatively or additionally, a biomarker or functional phenotype associated with PNPLA3 expression can be assessed in the treated animals.

[0059] In certain embodiments, expression of PNPLA3 is reduced in liver cells by at least 10%, at least 15%, at least 20%, at least 25%, at least 30%, at least 35%, at least 40%, at least 45%, or at least 50% by an RNAi construct of the invention. In some embodiments, expression of PNPLA3 is reduced in liver cells by at least 60%, at least 65%, at least 70%, at least 75%, at least 80%, or at least 85% by an RNAi construct of the invention. In other embodiments, the expression of PNPLA3 is reduced in liver cells by about 90% or more, e.g., 91%, 92%, 93%, 94%, 95%, 96%, 97%, 98%, 99%, or more by an RNAi construct of the invention. The percent reduction of PNPLA3 expression can be measured by any of the methods described herein as well as others known in the art. For instance, in certain embodiments, the RNAi constructs of the invention inhibit at least 45% of PNPLA3 expression at 5 nM in Hep3B cells (contains wild type PNPLA3) in vitro. In related embodiments, the RNAi constructs of the invention inhibit at least 50%, at least 55%, at least 60%, at least 65%, at least 70%, or at least 75% of PNPLA3 expression at 5 nM in Hep3B cells in vitro. In other embodiments, the RNAi constructs of the invention inhibit at least 80%, at least 85%, at least 90%, at least 92%, at least 94%, at least 96%, or at least 98% of PNPLA3 expression at 5 nM in Hep3B cells in vitro. In certain embodiments, the RNAi constructs of the invention inhibit at least 45% of PNPLA3 expression at 5 nM in HepG2 cells (contains the PNPLA3-rs738409-rs738408 double minor allele) in vitro. In related embodiments, the RNAi constructs of the invention inhibit at least 50%, at least 55%, at least 60%, at least 65%, at least 70%, or at least 75% of PNPLA3 expression at 5 nM in HepG2 cells in vitro. In other embodiments, the RNAi constructs of the invention inhibit at least 80%, at least 85%, at least 90%, at least 92%, at least 94%, at least 96%, or at least 98% of PNPLA3 expression at 5 nM in HepG2 cells in vitro. In certain embodiments, the RNAi constructs of the invention inhibit at least 45% of PNPLA3 expression at 5 nM in CHO transfected cells expressing human PNPLA3 I1481 or I148M cells in vitro. In related embodiments, the RNAi constructs of the invention inhibit at least 50%, at least 55%, at least 60%, at least 65%, at least 70%, or at least 75% of PNPLA3 expression at 5 nM in CHO transfected cells expressing human PNPLA3 I1481 or I148M in vitro. In other embodiments, the RNAi constructs of the invention inhibit at least 80%, at least 85%, at least 90%, at least 92%, at least 94%, at least 96%, or at least 98% of PNPLA3 expression at 5 nM in CHO transfected cells expressing human PNPLA3 I1481 or I148M in vitro. Reduction of PNPLA3 can be measured using a variety of techniques including RNA FISH or droplet digital PCR, as described in Examples 2 and 3.

[0060] In some embodiments, an IC50 value is calculated to assess the potency of an RNAi construct of the invention for inhibiting PNPLA3 expression in liver cells. An “IC50 value” is the dose/concentration required to achieve 50% inhibition of a biological or biochemical function. The IC50 value of any particular substance or antagonist can be determined by constructing a dose-response curve and examining the effect of different concentrations of the substance or antagonist on expression levels or functional activity in any assay. IC50 values can be calculated for a given antagonist or substance by determining the concentration needed to inhibit half of the maximum biological response or native expression levels. Thus, the IC50 value for any RNAi construct can be calculated by determining the concentration of the RNAi construct needed to inhibit half of the native PNPLA3 expression level in liver cells (e.g. PNPLA3 expression level in control liver cells) in any assay, such as the immunoassay or RNA FISH assay or droplet digital PCR assays described in the Examples. The RNAi constructs of the invention may inhibit PNPLA3 expression in liver cells (e.g. Hep3B cells) with an IC50 of less than about 20 nM. For example, the RNAi constructs inhibit PNPLA3 expression in liver cells with an IC50 of about 0.001 nM to about 20 nM, about 0.001 nM to about 10 nM, about 0.001 nM to about 5 nM, about 0.001 nM to about 1 nM, about 0.1 nM to about 10 nM, about 0.1 nM to about 5 nM, or about 0.1 nM to about 1 nM. In certain embodiments, the RNAi construct inhibits PNPLA3 expression in liver cells (e.g. Hep3B cells) with an IC50 of about 1 nM to about 10 nM. The RNAi constructs of the invention may inhibit PNPLA3 expression in liver cells (e.g. HepG2 cells) with an IC50 of less than about 20 nM. For example, the RNAi constructs inhibit PNPLA3 expression in liver cells with an IC50 of about 0.001 nM to about 20 nM, about 0.001 nM to about 10 nM, about 0.001 nM to about 5 nM, about 0.001 nM to about 1 nM, about 0.1 nM to about 10 nM, about 0.1 nM to about 5 nM, or about 0.1 nM to about 1 nM. In certain embodiments, the RNAi construct inhibits PNPLA3 expression in liver cells (e.g. HepG2 cells) with an IC50 of about 1 nM to about 10 nM. The RNAi constructs of the invention may inhibit PNPLA3 expression in liver cells (e.g. CHO transfected cells expressing human PNPLA3 I1481 or I148M) with an IC50 of less than about 20 nM. For example, the RNAi constructs inhibit PNPLA3 expression in liver cells with an IC50 of about 0.001 nM to about 20 nM, about 0.001 nM to about 10 nM, about 0.001 nM to about 5 nM, about 0.001 nM to about 1 nM, about 0.1 nM to about 10 nM, about 0.1 nM to about 5 nM, or about 0.1 nM to about 1 nM. In certain embodiments, the RNAi construct inhibits PNPLA3 expression in liver cells (e.g. CHO transfected cells expressing human PNPLA3 I1481 or I148M) with an IC50 of about 1 nM to about 10 nM.

[0061] The RNAi constructs of the invention can readily be made using techniques known in the art, for example, using conventional nucleic acid solid phase synthesis. The polynucleotides of the RNAi constructs can be assembled on a suitable nucleic acid synthesizer utilizing standard nucleotide or nucleoside precursors (e.g. phosphoramidites). Automated nucleic acid synthesizers are sold commercially by several vendors, including DNA/RNA synthesizers from Applied Biosystems (Foster City, Calif.), MerMade synthesizers from BioAutomation (Irving, Tex.), and OligoPilot synthesizers from GE Healthcare Life Sciences (Pittsburgh, Pa.).

[0062] The 2′ silyl protecting group can be used in conjunction with acid labile dimethoxytrityl (DMT) at the 5′ position of ribonucleosides to synthesize oligonucleotides via phosphoramidite chemistry. Final deprotection conditions are known not to significantly degrade RNA products. All syntheses can be conducted in any automated or manual synthesizer on large, medium, or small scale. The syntheses may also be carried out in multiple well plates, columns, or glass slides.

[0063] The 2′-O-silyl group can be removed via exposure to fluoride ions, which can include any source of fluoride ion, e.g., those salts containing fluoride ion paired with inorganic counterions, e.g., cesium fluoride and potassium fluoride or those salts containing fluoride ion paired with an organic counterion, e.g., a tetraalkylammonium fluoride. A crown ether catalyst can be utilized in combination with the inorganic fluoride in the deprotection reaction. Preferred fluoride ion source are tetrabutylammonium fluoride or aminohydrofluorides (e.g., combining aqueous HF with triethylamine in a dipolar aprotic solvent, e.g., dimethylformamide).

[0064] The choice of protecting groups for use on the phosphite triesters and phosphotriesters can alter the stability of the triesters towards fluoride. Methyl protection of the phosphotriester or phosphitetriester can stabilize the linkage against fluoride ions and improve process yields.

[0065] Since ribonucleosides have a reactive 2′ hydroxyl substituent, it can be desirable to protect the reactive 2′ position in RNA with a protecting group that is orthogonal to a 5′-O-dimethoxytrityl protecting group, e.g., one stable to treatment with acid. Silyl protecting groups meet this criterion and can be readily removed in a final fluoride deprotection step that can result in minimal RNA degradation.

[0066] Tetrazole catalysts can be used in the standard phosphoramidite coupling reaction. Preferred catalysts include, e.g., tetrazole, S-ethyl-tetrazole, benzylthiotetrazole, pnitrophenyltetrazole.

[0067] As can be appreciated by the skilled artisan, further methods of synthesizing the RNAi constructs described herein will be evident to those of ordinary skill in the art. Additionally, the various synthetic steps may be performed in an alternate sequence or order to give the desired compounds. Other synthetic chemistry transformations, protecting groups (e.g., for hydroxyl, amino, etc. present on the bases) and protecting group methodologies (protection and deprotection) useful in synthesizing the RNAi constructs described herein are known in the art and include, for example, those such as described in R. Larock, Comprehensive Organic Transformations, VCH Publishers (1989); T. W. Greene and P. G. M. Wuts, Protective Groups in Organic Synthesis, 2d. Ed., John Wiley and Sons (1991); L. Fieser and M. Fieser, Fieser and Fieser's Reagents for Organic Synthesis, John Wiley and Sons (1994); and L. Paquette, ed., Encyclopedia of Reagents for Organic Synthesis, John Wiley and Sons (1995), and subsequent editions thereof Custom synthesis of RNAi agents is also available from several commercial vendors, including Dharmacon, Inc. (Lafayette, Colo.), AxoLabs GmbH (Kulmbach, Germany), and Ambion, Inc. (Foster City, Calif.).

[0068] The RNAi constructs of the invention may comprise a ligand. As used herein, a “ligand” refers to any compound or molecule that is capable of interacting with another compound or molecule, directly or indirectly. The interaction of a ligand with another compound or molecule may elicit a biological response (e.g. initiate a signal transduction cascade, induce receptor mediated endocytosis) or may just be a physical association. The ligand can modify one or more properties of the double-stranded RNA molecule to which is attached, such as the pharmacodynamic, pharmacokinetic, binding, absorption, cellular distribution, cellular uptake, charge and/or clearance properties of the RNA molecule.

[0069] The ligand may comprise a serum protein (e.g., human serum albumin, low-density lipoprotein, globulin), a cholesterol moiety, a vitamin (biotin, vitamin E, vitamin B12), a folate moiety, a steroid, a bile acid (e.g. cholic acid), a fatty acid (e.g., palmitic acid, myristic acid), a carbohydrate (e.g., a dextran, pullulan, chitin, chitosan, inulin, cyclodextrin or hyaluronic acid), a glycoside, a phospholipid, or antibody or binding fragment thereof (e.g. antibody or binding fragment that targets the RNAi construct to a specific cell type, such as liver). Other examples of ligands include dyes, intercalating agents (e.g. acridines), cross-linkers (e.g. psoralene, mitomycin C), porphyrins (TPPC4, texaphyrin, Sapphyrin), polycyclic aromatic hydrocarbons (e.g., phenazine, dihydrophenazine), artificial endonucleases (e.g. EDTA), lipophilic molecules, e.g, adamantane acetic acid, 1-pyrene butyric acid, dihydrotestosterone, 1,3-BisO(hexadecyl)glycerol, geranyloxyhexyl group, hexadecylglycerol, borneol, menthol, 1,3-propanediol, heptadecyl group, 03-(oleoyl)lithocholic acid, 03-(oleoyl)cholenic acid, dimethoxytrityl, or phenoxazine), peptides (e.g., antennapedia peptide, Tat peptide, RGD peptides), alkylating agents, polymers, such as polyethylene glycol (PEG) (e.g., PEG-40K), poly amino acids, and polyamines (e.g. spermine, spermidine).

[0070] In certain embodiments, the ligands have endosomolytic properties. The endosomolytic ligands promote the lysis of the endosome and/or transport of the RNAi construct of the invention, or its components, from the endosome to the cytoplasm of the cell. The endosomolytic ligand may be a polycationic peptide or peptidomimetic which shows pH dependent membrane activity and fusogenicity. In one embodiment, the endosomolytic ligand assumes its active conformation at endosomal pH. The “active” conformation is that conformation in which the endosomolytic ligand promotes lysis of the endosome and/or transport of the RNAi construct of the invention, or its components, from the endosome to the cytoplasm of the cell. Exemplary endosomolytic ligands include the GALA peptide (Subbarao et al., Biochemistry, Vol. 26: 2964-2972, 1987), the EALA peptide (Vogel et al., J. Am. Chern. Soc., Vol. 118: 1581-1586, 1996), and their derivatives (Turk et al., Biochem. Biophys. Acta, Vol. 1559: 56-68, 2002). In one embodiment, the endosomolytic component may contain a chemical group (e.g., an amino acid) which will undergo a change in charge or protonation in response to a change in pH. The endosomolytic component may be linear or branched.

[0071] In some embodiments, the ligand comprises a lipid or other hydrophobic molecule. In one embodiment, the ligand comprises a cholesterol moiety or other steroid. Cholesterol conjugated oligonucleotides have been reported to be more active than their unconjugated counterparts (Manoharan, Antisense Nucleic Acid Drug Development, Vol. 12: 103-228, 2002). Ligands comprising cholesterol moieties and other lipids for conjugation to nucleic acid molecules have also been described in U.S. Pat. Nos. 7,851,615; 7,745,608; and 7,833,992, all of which are hereby incorporated by reference in their entireties. In another embodiment, the ligand comprises a folate moiety. Polynucleotides conjugated to folate moieties can be taken up by cells via a receptor-mediated endocytosis pathway. Such folate-polynucleotide conjugates are described in U.S. Pat. No. 8,188,247, which is hereby incorporated by reference in its entirety.

[0072] Given that PNPLA3 is expressed in liver cells (e.g. hepatocytes), in certain embodiments, it is desirable to specifically deliver the RNAi construct to those liver cells. In some embodiments, RNAi constructs can be specifically targeted to the liver by employing ligands that bind to or interact with proteins expressed on the surface of liver cells. For example, in certain embodiments, the ligands may comprise antigen binding proteins (e.g. antibodies or binding fragments thereof (e.g. Fab, scFv)) that specifically bind to a receptor expressed on hepatocytes.

[0073] In certain embodiments, the ligand comprises a carbohydrate. A “carbohydrate” refers to a compound made up of one or more monosaccharide units having at least 6 carbon atoms (which can be linear, branched or cyclic) with an oxygen, nitrogen or sulfur atom bonded to each carbon atom. Carbohydrates include, but are not limited to, the sugars (e.g., monosaccharides, disaccharides, trisaccharides, tetrasaccharides, and oligosaccharides containing from about 4, 5, 6, 7, 8, or 9 monosaccharide units), and polysaccharides, such as starches, glycogen, cellulose and polysaccharide gums. In some embodiments, the carbohydrate incorporated into the ligand is a monosaccharide selected from a pentose, hexose, or heptose and di- and tri-saccharides including such monosaccharide units. In other embodiments, the carbohydrate incorporated into the ligand is an amino sugar, such as galactosamine, glucosamine, N-acetylgalactosamine, and N-acetylglucosamine.

[0074] In some embodiments, the ligand comprises a hexose or hexosamine. The hexose may be selected from glucose, galactose, mannose, fucose, or fructose. The hexosamine may be selected from fructosamine, galactosamine, glucosamine, or mannosamine. In certain embodiments, the ligand comprises glucose, galactose, galactosamine, or glucosamine. In one embodiment, the ligand comprises glucose, glucosamine, or N-acetylglucosamine. In another embodiment, the ligand comprises galactose, galactosamine, or N-acetyl-galactosamine. In particular embodiments, the ligand comprises N-acetyl-galactosamine. Ligands comprising glucose, galactose, and N-acetyl-galactosamine (GalNAc) are particularly effective in targeting compounds to liver cells. See, e.g., D'Souza and Devarajan, J. Control Release, Vol. 203: 126-139, 2015. Examples of GalNAc- or galactose-containing ligands that can be incorporated into the RNAi constructs of the invention are described in U.S. Pat. Nos. 7,491,805; 8,106,022; and 8,877,917; U.S. Patent Publication No. 20030130186; and WIPO Publication No. WO2013166155, all of which are hereby incorporated by reference in their entireties.

[0075] In certain embodiments, the ligand comprises a multivalent carbohydrate moiety. As used herein, a “multivalent carbohydrate moiety” refers to a moiety comprising two or more carbohydrate units capable of independently binding or interacting with other molecules. For example, a multivalent carbohydrate moiety comprises two or more binding domains comprised of carbohydrates that can bind to two or more different molecules or two or more different sites on the same molecule. The valency of the carbohydrate moiety denotes the number of individual binding domains within the carbohydrate moiety. For instance, the terms “monovalent,” “bivalent,” “trivalent,” and “tetravalent” with reference to the carbohydrate moiety refer to carbohydrate moieties with one, two, three, and four binding domains, respectively. The multivalent carbohydrate moiety may comprise a multivalent lactose moiety, a multivalent galactose moiety, a multivalent glucose moiety, a multivalent N-acetyl-galactosamine moiety, a multivalent N-acetyl-glucosamine moiety, a multivalent mannose moiety, or a multivalent fucose moiety. In some embodiments, the ligand comprises a multivalent galactose moiety. In other embodiments, the ligand comprises a multivalent N-acetyl-galactosamine moiety. In these and other embodiments, the multivalent carbohydrate moiety is bivalent, trivalent, or tetravalent. In such embodiments, the multivalent carbohydrate moiety can be bi-antennary or tri-antennary. In one particular embodiment, the multivalent N-acetyl-galactosamine moiety is trivalent or tetravalent. In another particular embodiment, the multivalent galactose moiety is trivalent or tetravalent. Exemplary trivalent and tetravalent GalNAc-containing ligands for incorporation into the RNAi constructs of the invention are described in detail below.

[0076] The ligand can be attached or conjugated to the RNA molecule of the RNAi construct directly or indirectly. For instance, in some embodiments, the ligand is covalently attached directly to the sense or antisense strand of the RNAi construct. In other embodiments, the ligand is covalently attached via a linker to the sense or antisense strand of the RNAi construct. The ligand can be attached to nucleobases, sugar moieties, or internucleotide linkages of polynucleotides (e.g. sense strand or antisense strand) of the RNAi constructs of the invention. Conjugation or attachment to purine nucleobases or derivatives thereof can occur at any position including, endocyclic and exocyclic atoms. In certain embodiments, the 2-, 6-, 7-, or 8-positions of a purine nucleobase are attached to a ligand. Conjugation or attachment to pyrimidine nucleobases or derivatives thereof can also occur at any position. In some embodiments, the 2-, 5-, and 6-positions of a pyrimidine nucleobase can be attached to a ligand. Conjugation or attachment to sugar moieties of nucleotides can occur at any carbon atom. Example carbon atoms of a sugar moiety that can be attached to a ligand include the 2′, 3′, and 5′ carbon atoms. The 1′ position can also be attached to a ligand, such as in an a basic residue. Internucleotide linkages can also support ligand attachments. For phosphorus-containing linkages (e.g., phosphodiester, phosphorothioate, phosphorodithiotate, phosphoroamidate, and the like), the ligand can be attached directly to the phosphorus atom or to an O, N, or S atom bound to the phosphorus atom. For amine- or amide-containing internucleoside linkages (e.g., PNA), the ligand can be attached to the nitrogen atom of the amine or amide or to an adjacent carbon atom.

[0077] In certain embodiments, the ligand may be attached to the 3′ or 5′ end of either the sense or antisense strand. In certain embodiments, the ligand is covalently attached to the 5′ end of the sense strand. In other embodiments, the ligand is covalently attached to the 3′ end of the sense strand. For example, in some embodiments, the ligand is attached to the 3′-terminal nucleotide of the sense strand. In certain such embodiments, the ligand is attached at the 3′-position of the 3′-terminal nucleotide of the sense strand. In alternative embodiments, the ligand is attached near the 3′ end of the sense strand, but before one or more terminal nucleotides (i.e. before 1, 2, 3, or 4 terminal nucleotides). In some embodiments, the ligand is attached at the 2′-position of the sugar of the 3′-terminal nucleotide of the sense strand.

[0078] In certain embodiments, the ligand is attached to the sense or antisense strand via a linker. A “linker” is an atom or group of atoms that covalently joins a ligand to a polynucleotide component of the RNAi construct. The linker may be from about 1 to about 30 atoms in length, from about 2 to about 28 atoms in length, from about 3 to about 26 atoms in length, from about 4 to about 24 atoms in length, from about 6 to about 20 atoms in length, from about 7 to about 20 atoms in length, from about 8 to about 20 atoms in length, from about 8 to about 18 atoms in length, from about 10 to about 18 atoms in length, and from about 12 to about 18 atoms in length. In some embodiments, the linker may comprise a bifunctional linking moiety, which generally comprises an alkyl moiety with two functional groups. One of the functional groups is selected to bind to the compound of interest (e.g. sense or antisense strand of the RNAi construct) and the other is selected to bind essentially any selected group, such as a ligand as described herein. In certain embodiments, the linker comprises a chain structure or an oligomer of repeating units, such as ethylene glycol or amino acid units. Examples of functional groups that are typically employed in a bifunctional linking moiety include, but are not limited to, electrophiles for reacting with nucleophilic groups and nucleophiles for reacting with electrophilic groups. In some embodiments, bifunctional linking moieties include amino, hydroxyl, carboxylic acid, thiol, unsaturations (e.g., double or triple bonds), and the like.

[0079] Linkers that may be used to attach a ligand to the sense or antisense strand in the RNAi constructs of the invention include, but are not limited to, pyrrolidine, 8-amino-3,6-dioxaoctanoic acid, succinimidyl 4-(N-maleimidomethyl)cyclohexane-1-carboxylate, 6-aminohexanoic acid, substituted C1-C10 alkyl, substituted or unsubstituted C2-C10 alkenyl or substituted or unsubstituted C2-C10 alkynyl. Preferred substituent groups for such linkers include, but are not limited to, hydroxyl, amino, alkoxy, carboxy, benzyl, phenyl, nitro, thiol, thioalkoxy, halogen, alkyl, aryl, alkenyl and alkynyl.

[0080] In certain embodiments, the linkers are cleavable. A cleavable linker is one which is sufficiently stable outside the cell, but which upon entry into a target cell is cleaved to release the two parts the linker is holding together. In some embodiments, the cleavable linker is cleaved at least 10 times, 20 times, 30 times, 40 times, 50 times, 60 times, 70 times, 80 times, 90 times, or more, or at least 100 times faster in the target cell or under a first reference condition (which can, e.g., be selected to mimic or represent intracellular conditions) than in the blood of a subject, or under a second reference condition (which can, e.g., be selected to mimic or represent conditions found in the blood or serum).

[0081] Cleavable linkers are susceptible to cleavage agents, e.g., pH, redox potential or the presence of degradative molecules. Generally, cleavage agents are more prevalent or found at higher levels or activities inside cells than in serum or blood. Examples of such degradative agents include: redox agents which are selected for particular substrates or which have no substrate specificity, including, e.g., oxidative or reductive enzymes or reductive agents such as mercaptans, present in cells, that can degrade a redox cleavable linker by reduction; esterases; endosomes or agents that can create an acidic environment, e.g., those that result in a pH of five or lower; enzymes that can hydrolyze or degrade an acid cleavable linker by acting as a general acid, peptidases (which can be substrate specific), and phosphatases.

[0082] A cleavable linker may comprise a moiety that is susceptible to pH. The pH of human serum is 7.4, while the average intracellular pH is slightly lower, ranging from about 7.1-7.3. Endosomes have a more acidic pH, in the range of 5.5-6.0, and lysosomes have an even more acidic pH at around 5.0. Some linkers will have a cleavable group that is cleaved at a preferred pH, thereby releasing the RNA molecule from the ligand inside the cell, or into the desired compartment of the cell.

[0083] A linker can include a cleavable group that is cleavable by a particular enzyme. The type of cleavable group incorporated into a linker can depend on the cell to be targeted. For example, liver-targeting ligands can be linked to RNA molecules through a linker that includes an ester group. Liver cells are rich in esterases, and therefore the linker will be cleaved more efficiently in liver cells than in cell types that are not esterase-rich. Other types of cells rich in esterases include cells of the lung, renal cortex, and testis. Linkers that contain peptide bonds can be used when targeting cells rich in peptidases, such as liver cells and synoviocytes.

[0084] In general, the suitability of a candidate cleavable linker can be evaluated by testing the ability of a degradative agent (or condition) to cleave the candidate linker. It will also be desirable to also test the candidate cleavable linker for the ability to resist cleavage in the blood or when in contact with other non-target tissue. Thus, one can determine the relative susceptibility to cleavage between a first and a second condition, where the first is selected to be indicative of cleavage in a target cell and the second is selected to be indicative of cleavage in other tissues or biological fluids, e.g., blood or serum. The evaluations can be carried out in cell free systems, in cells, in cell culture, in organ or tissue culture, or in whole animals. It may be useful to make initial evaluations in cell-free or culture conditions and to confirm by further evaluations in whole animals. In some embodiments, useful candidate linkers are cleaved at least 2, 4, 10, 20, 50, 70, or 100 times faster in the cell (or under in vitro conditions selected to mimic intracellular conditions) as compared to blood or serum (or under in vitro conditions selected to mimic extracellular conditions).

[0085] In other embodiments, redox cleavable linkers are utilized. Redox cleavable linkers are cleaved upon reduction or oxidation. An example of reductively cleavable group is a disulfide linking group (—S—S—). To determine if a candidate cleavable linker is a suitable “reductively cleavable linker,” or for example is suitable for use with a particular RNAi construct and particular ligand, one can use one or more methods described herein. For example, a candidate linker can be evaluated by incubation with dithiothreitol (DTT), or other reducing agent known in the art, which mimics the rate of cleavage that would be observed in a cell, e.g., a target cell. The candidate linkers can also be evaluated under conditions which are selected to mimic blood or serum conditions. In a specific embodiment, candidate linkers are cleaved by at most 10% in the blood. In other embodiments, useful candidate linkers are degraded at least 2, 4, 10, 20, 50, 70, or 100 times faster in the cell (or under in vitro conditions selected to mimic intracellular conditions) as compared to blood (or under in vitro conditions selected to mimic extracellular conditions).

[0086] In yet other embodiments, phosphate-based cleavable linkers are cleaved by agents that degrade or hydrolyze the phosphate group. An example of an agent that hydrolyzes phosphate groups in cells are enzymes, such as phosphatases in cells. Examples of phosphate-based cleavable groups are —O—P(O)(ORk)-O—, —O—P(S)(ORk)-O—, —O—P(S)(SRk)-O—, —S—P(O)(ORk)-O—, —O—P(O)(ORk)-S—, —S—P(O)(ORk)-S—, —O—P(S)(ORk)-S—, —S—P(S)(ORk)-O—, —O—P(O)(Rk)-O—, —O—P(S)(Rk)-O—, —S—P(O)(Rk)-O—, —S—P(S)(Rk)-O—, —S—P(O)(Rk)-S—, —O—P(S)(Rk)-S—. Specific embodiments include —O—P(O)(OH)—O—, —O—P(S)(OH)—O—, —O—P(S)(SH)—O—, —S—P(O)(OH)—O—, —O—P(O)(OH)—S—, —S—P(O)(OH)—S—, —O—P(S)(OH)—S—, —SP(S)(OH)—O—, —O—P(O)(H)—O—, —O—P(S)(H)—O—, —S—P(O)(H)—O—, —S—P(S)(H)—O—, —S—P(O)(H)—S—, —O—P(S)(H)—S—. Another specific embodiment is —O—P(O)(OH)—O—. These candidate linkers can be evaluated using methods analogous to those described above.

[0087] In other embodiments, the linkers may comprise acid cleavable groups, which are groups that are cleaved under acidic conditions. In some embodiments, acid cleavable groups are cleaved in an acidic environment with a pH of about 6.5 or lower (e.g., about 6.0, 5.5, 5.0, or lower), or by agents, such as enzymes that can act as a general acid. In a cell, specific low pH organelles, such as endosomes and lysosomes, can provide a cleaving environment for acid cleavable groups. Examples of acid cleavable linking groups include, but are not limited to, hydrazones, esters, and esters of amino acids. Acid cleavable groups can have the general formula —C═NN—, C(O)O, or —OC(O). A specific embodiment is when the carbon attached to the oxygen of the ester (the alkoxy group) is an aryl group, substituted alkyl group, or tertiaryalkyl group such as dimethyl, pentyl or t-butyl. These candidates can be evaluated using methods analogous to those described above.

[0088] In other embodiments, the linkers may comprise ester-based cleavable groups, which are cleaved by enzymes, such as esterases and amidases in cells. Examples of ester-based cleavable groups include, but are not limited to, esters of alkylene, alkenylene and alkynylene groups. Ester cleavable groups have the general formula —C(O)O—, or —OC(O)—. These candidate linkers can be evaluated using methods analogous to those described above.

[0089] In further embodiments, the linkers may comprise peptide-based cleavable groups, which are cleaved by enzymes, such as peptidases and proteases in cells. Peptide-based cleavable groups are peptide bonds formed between amino acids to yield oligopeptides (e.g., dipeptides, tripeptides etc.) and polypeptides. Peptide-based cleavable groups do not include the amide group (—C(O)NH—). The amide group can be formed between any alkylene, alkenylene or alkynelene. A peptide bond is a special type of amide bond formed between amino acids to yield peptides and proteins. The peptide based cleavage group is generally limited to the peptide bond (i.e., the amide bond) formed between amino acids yielding peptides and proteins and does not include the entire amide functional group. Peptide-based cleavable linking groups have the general formula —NHCHRAC(O)NHCHRBC(O)—, where RA and RB are the R groups of the two adjacent amino acids. These candidates can be evaluated using methods analogous to those described above.

[0090] Other types of linkers suitable for attaching ligands to the sense or antisense strands in the RNAi constructs of the invention are known in the art and can include the linkers described in U.S. Pat. Nos. 7,723,509; 8,017,762; 8,828,956; 8,877,917; and 9,181,551, all of which are hereby incorporated by reference in their entireties.

[0091] In certain embodiments, the ligand covalently attached to the sense or antisense strand of the RNAi constructs of the invention comprises a GalNAc moiety, e.g, a multivalent GalNAc moiety. In some embodiments, the multivalent GalNAc moiety is a trivalent GalNAc moiety and is attached to the 3′ end of the sense strand. In other embodiments, the multivalent GalNAc moiety is a trivalent GalNAc moiety and is attached to the 5′ end of the sense strand. In yet other embodiments, the multivalent GalNAc moiety is a tetravalent GalNAc moiety and is attached to the 3′ end of the sense strand. In still other embodiments, the multivalent GalNAc moiety is a tetravalent GalNAc moiety and is attached to the 5′ end of the sense strand.

[0092] In some embodiments, the RNAi constructs of the invention may be delivered to a cell or tissue of interest by administering a vector that encodes and controls the intracellular expression of the RNAi construct. A “vector” (also referred to herein as an “expression vector) is a composition of matter which can be used to deliver a nucleic acid of interest to the interior of a cell. Numerous vectors are known in the art including, but not limited to, linear polynucleotides, polynucleotides associated with ionic or amphiphilic compounds, plasmids, and viruses. Thus, the term “vector” includes an autonomously replicating plasmid or a virus. Examples of viral vectors include, but are not limited to, adenoviral vectors, adeno-associated viral vectors, retroviral vectors, and the like. A vector can be replicated in a living cell, or it can be made synthetically.

[0093] Generally, a vector for expressing an RNAi construct of the invention will comprise one or more promoters operably linked to sequences encoding the RNAi construct. The phrase “operably linked” or “under transcriptional control” as used herein means that the promoter is in the correct location and orientation in relation to a polynucleotide sequence to control the initiation of transcription by RNA polymerase and expression of the polynucleotide sequence. A “promoter” refers to a sequence recognized by the synthetic machinery of the cell, or introduced synthetic machinery, required to initiate the specific transcription of a gene sequence. Suitable promoters include, but are not limited to, RNA pol I, pol II, HI or U6 RNA pol III, and viral promoters (e.g. human cytomegalovirus (CMV) immediate early gene promoter, the SV40 early promoter, and the Rous sarcoma virus long terminal repeat). In some embodiments, a HI or U6RNA pol III promoter is preferred. The promoter can be a tissue-specific or inducible promoter. Of particular interest are liver-specific promoters, such as promoter sequences from human alpha!-antitrypsin gene, albumin gene, hemopexin gene, and hepatic lipase gene. Inducible promoters include promoters regulated by ecdysone, estrogen, progesterone, tetracycline, and isopropyl-PD1-thiogalactopyranoside (IPTG).

[0094] In some embodiments in which the RNAi construct comprises a siRNA, the two separate strands (sense and antisense strand) can be expressed from a single vector or two separate vectors. For example, in one embodiment, the sequence encoding the sense strand is operably linked to a promoter on a first vector and the sequence encoding the antisense strand is operably linked to a promoter on a second vector. In such an embodiment, the first and second vectors are co-introduced, e.g., by infection or transfection, into a target cell, such that the sense and anti sense strands, once transcribed, will hybridize intracellularly to form the siRNA molecule. In another embodiment, the sense and antisense strands are transcribed from two separate promoters located in a single vector. In some such embodiments, the sequence encoding the sense strand is operably linked to a first promoter and the sequence encoding the antisense strand is operably linked to a second promoter, wherein the first and second promoters are located in a single vector. In one embodiment, the vector comprises a first promoter operably linked to a sequence encoding the siRNA molecule, and a second promoter operably linked to the same sequence in the opposite direction, such that transcription of the sequence from the first promoter results in the synthesis of the sense strand of the siRNA molecule and transcription of the sequence from the second promoter results in synthesis of the antisense strand of the siRNA molecule.

[0095] In other embodiments in which the RNAi construct comprises a shRNA, a sequence encoding the single, at least partially self-complementary RNA molecule is operably linked to a promoter to produce a single transcript. In some embodiments, the sequence encoding the shRNA comprises an inverted repeat joined by a linker polynucleotide sequence to produce the stem and loop structure of the shRNA following transcription.

[0096] In some embodiments, the vector encoding an RNAi construct of the invention is a viral vector. Various viral vector systems that are suitable to express the RNAi constructs described herein include, but are not limited to, adenoviral vectors, retroviral vectors (e.g., lentiviral vectors, maloney murine leukemia virus), adeno-associated viral vectors; herpes simplex viral vectors; SV 40 vectors; polyoma viral vectors; papilloma viral vectors; picornaviral vectors; and pox viral vectors (e.g. vaccinia virus). In certain embodiments, the viral vector is a retroviral vector (e.g. lentiviral vector).

[0097] Various vectors suitable for use in the invention, methods for inserting nucleic acid sequences encoding siRNA or shRNA molecules into vectors, and methods of delivering the vectors to the cells of interest are within the skill of those in the art. See, e.g., Dornburg, Gene Therap., Vol. 2: 301-310, 1995; Eglitis, Biotechniques, Vol. 6: 608-614, 1988; Miller, HumGene Therap., Vol. 1: 5-14, 1990; Anderson, Nature, Vol. 392: 25-30, 1998; Rubinson D A et al., Nat. Genet., Vol. 33: 401-406, 2003; Brummelkamp et al., Science, Vol. 296: 550-553, 2002; Brummelkamp et al., Cancer Cell, Vol. 2: 243-247, 2002; Lee et al., Nat Biotechnol, Vol. 20:500-505, 2002; Miyagishi et al., Nat Biotechnol, Vol. 20: 497-500, 2002; Paddison et al., Genes Dev, Vol. 16: 948-958, 2002; Paul et al., Nat Biotechnol, Vol. 20: 505-508, 2002; Sui et al., Proc Natl Acad Sci USA, Vol. 99: 5515-5520, 2002; and Yu et al., Proc Natl Acad Sci USA, Vol. 99:6047-6052, 2002, all of which are hereby incorporated by reference in their entireties.

[0098] The present invention also includes pharmaceutical compositions and formulations comprising the RNAi constructs described herein and pharmaceutically acceptable carriers, excipients, or diluents. Such compositions and formulations are useful for reducing expression of PNPLA3 in a subject in need thereof Where clinical applications are contemplated, pharmaceutical compositions and formulations will be prepared in a form appropriate for the intended application. Generally, this will entail preparing compositions that are essentially free of pyrogens, as well as other impurities that could be harmful to humans or animals.

[0099] The phrases “pharmaceutically acceptable” or “pharmacologically acceptable” refer to molecular entities and compositions that do not produce adverse, allergic, or other untoward reactions when administered to an animal or a human. As used herein, “pharmaceutically acceptable carrier, excipient, or diluent” includes solvents, buffers, solutions, dispersion media, coatings, antibacterial and antifungal agents, isotonic and absorption delaying agents and the like acceptable for use in formulating pharmaceuticals, such as pharmaceuticals suitable for administration to humans. The use of such media and agents for pharmaceutically active substances is well known in the art. Except insofar as any conventional media or agent is incompatible with the RNAi constructs of the present invention, its use in therapeutic compositions is contemplated. Supplementary active ingredients also can be incorporated into the compositions, provided they do not inactivate the vectors or RNAi constructs of the compositions.

[0100] Compositions and methods for the formulation of pharmaceutical compositions depend on a number of criteria, including, but not limited to, route of administration, type and extent of disease or disorder to be treated, or dose to be administered. In some embodiments, the pharmaceutical compositions are formulated based on the intended route of delivery. For instance, in certain embodiments, the pharmaceutical compositions are formulated for parenteral delivery. Parenteral forms of delivery include intravenous, intraarterial, subcutaneous, intrathecal, intraperitoneal or intramuscular injection or infusion. In one embodiment, the pharmaceutical composition is formulated for intravenous delivery. In such an embodiment, the pharmaceutical composition may include a lipid-based delivery vehicle. In another embodiment, the pharmaceutical composition is formulated for subcutaneous delivery. In such an embodiment, the pharmaceutical composition may include a targeting ligand (e.g. GalNAc containing ligands described herein).

[0101] In some embodiments, the pharmaceutical compositions comprise an effective amount of an RNAi construct described herein. An “effective amount” is an amount sufficient to produce a beneficial or desired clinical result. In some embodiments, an effective amount is an amount sufficient to reduce PNPLA3 expression in hepatocytes of a subject. In some embodiments, an effective amount may be an amount sufficient to only partially reduce PNPLA3 expression, for example, to a level comparable to expression of the wild-type PNPLA3 allele in human heterozygotes. Human heterozygous carriers of loss of function PNPLA3 variant alleles were reported to have lower serum levels of non-HDL cholesterol and a lower risk of coronary artery disease and myocardial infarction as compared to non-carriers (Nioi et al., New England Journal of Medicine, Vol. 374(22):2131-2141, 2016). Thus, without being bound by theory, it is believed that partial reduction of PNPLA3 expression may be sufficient to achieve the beneficial reduction of serum non-HDL cholesterol and reduction of risk of coronary artery disease and myocardial infarction.

[0102] An effective amount of an RNAi construct of the invention may be from about 0.01 mg/kg body weight to about 100 mg/kg body weight, about 0.05 mg/kg body weight to about 75 mg/kg body weight, about 0.1 mg/kg body weight to about 50 mg/kg body weight, about 1 mg/kg to about 30 mg/kg body weight, about 2.5 mg/kg of body weight to about 20 mg/kg bodyweight, or about 5 mg/kg body weight to about 15 mg/kg body weight. In certain embodiments, a single effective dose of an RNAi construct of the invention may be about 0.1 mg/kg, about 0.5 mg/kg, about 1 mg/kg, about 2 mg/kg, about 3 mg/kg, about 4 mg/kg, about 5 mg/kg, about 6 mg/kg, about 7 mg/kg, about 8 mg/kg, about 9 mg/kg, or about 10 mg/kg. The pharmaceutical composition comprising an effective amount of RNAi construct can be administered weekly, biweekly, monthly, quarterly, or biannually. The precise determination of what would be considered an effective amount and frequency of administration may be based on several factors, including a patient's size, age, and general condition, type of disorder to be treated (e.g. myocardial infarction, heart failure, coronary artery disease, hypercholesterolemia), particular RNAi construct employed, and route of administration. Estimates of effective dosages and in vivo half-lives for any particular RNAi construct of the invention can be ascertained using conventional methods and/or testing in appropriate animal models.

[0103] Administration of the pharmaceutical compositions of the present invention may be via any common route so long as the target tissue is available via that route. Such routes include, but are not limited to, parenteral (e.g., subcutaneous, intramuscular, intraperitoneal or intravenous), oral, nasal, buccal, intradermal, transdermal, and sublingual routes, or by direct injection into liver tissue or delivery through the hepatic portal vein. In some embodiments, the pharmaceutical composition is administered parenterally. For instance, in certain embodiments, the pharmaceutical composition is administered intravenously. In other embodiments, the pharmaceutical composition is administered subcutaneously.

[0104] Colloidal dispersion systems, such as macromolecule complexes, nanocapsules, microspheres, beads, and lipid-based systems, including oil-in-water emulsions, micelles, mixed micelles, and liposomes, may be used as delivery vehicles for the RNAi constructs of the invention or vectors encoding such constructs. Commercially available fat emulsions that are suitable for delivering the nucleic acids of the invention include Intralipid®, Liposyn®, Liposyn®II, Nutrilipid, and other similar lipid emulsions. A preferred colloidal system for use as a delivery vehicle in vivo is a liposome (i.e., an artificial membrane vesicle). The RNAi constructs of the invention may be encapsulated within liposomes or may form complexes thereto, in particular to cationic liposomes. Alternatively, RNAi constructs of the invention may be complexed to lipids, in particular to cationic lipids. Suitable lipids and liposomes include neutral (e.g., dioleoylphosphatidyl ethanolamine (DOPE), dimyristoylphosphatidyl choline (DMPC), and dipalmitoyl phosphatidylcholine (DPPC)), distearolyphosphatidyl choline), negative (e.g., dimyristoylphosphatidyl glycerol (DMPG)), and cationic (e.g., dioleoyltetramethylaminopropyl (DOTAP) and dioleoylphosphatidyl ethanolamine (DOTMA)). The preparation and use of such colloidal dispersion systems is well known in the art. Exemplary formulations are also disclosed in U.S. Pat. Nos. 5,981,505; 6,217,900; 6,383,512; 5,783,565; 7,202,227; 6,379,965; 6,127,170; 5,837,533; 6,747,014; and WO03/093449.

[0105] In some embodiments, the RNAi constructs of the invention are fully encapsulated in a lipid formulation, e.g., to form a SPLP, pSPLP, SNALP, or other nucleic acid-lipid particle. As used herein, the term “SNALP” refers to a stable nucleic acid-lipid particle, including SPLP. As used herein, the term “SPLP” refers to a nucleic acid-lipid particle comprising plasmid DNA encapsulated within a lipid vesicle. SNALPs and SPLPs typically contain a cationic lipid, a noncationic lipid, and a lipid that prevents aggregation of the particle (e.g., a PEG-lipid conjugate). SNALPs and SPLPs are exceptionally useful for systemic applications, as they exhibit extended circulation lifetimes following intravenous injection and accumulate at distal sites (e.g., sites physically separated from the administration site). SPLPs include “pSPLP,” which include an encapsulated condensing agent-nucleic acid complex as set forth in PCT Publication No. WO00/03683. The nucleic acid-lipid particles typically have a mean diameter of about 50 nm to about 150 nm, about 60 nm to about 130 nm, about 70 nm to about 110 nm, or about 70 nm to about 90 nm, and are substantially nontoxic. In addition, the nucleic acids when present in the nucleic acid-lipid particles are resistant in aqueous solution to degradation with a nuclease. Nucleic acid-lipid particles and their method of preparation are disclosed in, e.g., U.S. Pat. Nos. 5,976,567; 5,981,501; 6,534,484; 6,586,410; 6,815,432; and PCT Publication No. WO96/40964.

[0106] The pharmaceutical compositions suitable for injectable use include, for example, sterile aqueous solutions or dispersions and sterile powders for the extemporaneous preparation of sterile injectable solutions or dispersions. Generally, these preparations are sterile and fluid to the extent that easy injectability exists. Preparations should be stable under the conditions of manufacture and storage and should be preserved against the contaminating action of microorganisms, such as bacteria and fungi. Appropriate solvents or dispersion media may contain, for example, water, ethanol, polyol (for example, glycerol, propylene glycol, and liquid polyethylene glycol, and the like), suitable mixtures thereof, and vegetable oils. The proper fluidity can be maintained, for example, by the use of a coating, such as lecithin, by the maintenance of the required particle size in the case of dispersion and by the use of surfactants. The prevention of the action of microorganisms can be brought about by various antibacterial an antifungal agents, for example, parabens, chlorobutanol, phenol, sorbic acid, thimerosal, and the like. In many cases, it will be preferable to include isotonic agents, for example, sugars or sodium chloride. Prolonged absorption of the injectable compositions can be brought about by the use in the compositions of agents delaying absorption, for example, aluminum monostearate and gelatin.

[0107] Sterile injectable solutions may be prepared by incorporating the active compounds in an appropriate amount into a solvent along with any other ingredients (for example as enumerated above) as desired, followed by filtered sterilization. Generally, dispersions are prepared by incorporating the various sterilized active ingredients into a sterile vehicle which contains the basic dispersion medium and the desired other ingredients, e.g., as enumerated above. In the case of sterile powders for the preparation of sterile injectable solutions, the preferred methods of preparation include vacuum-drying and freeze-drying techniques which yield a powder of the active ingredient(s) plus any additional desired ingredient from a previously sterile-filtered solution thereof.

[0108] The compositions of the present invention generally may be formulated in a neutral or salt form. Pharmaceutically-acceptable salts include, for example, acid addition salts (formed with free amino groups) derived from inorganic acids (e.g., hydrochloric or phosphoric acids), or from organic acids (e.g., acetic, oxalic, tartaric, mandelic, and the like). Salts formed with the free carboxyl groups can also be derived from inorganic bases (e.g., sodium, potassium, ammonium, calcium, or ferric hydroxides) or from organic bases (e.g., isopropylamine, trimethylamine, histidine, procaine and the like).

[0109] For parenteral administration in an aqueous solution, for example, the solution generally is suitably buffered and the liquid diluent first rendered isotonic for example with sufficient saline or glucose. Such aqueous solutions may be used, for example, for intravenous, intramuscular, subcutaneous and intraperitoneal administration. Preferably, sterile aqueous media are employed as is known to those of skill in the art, particularly in light of the present disclosure. By way of illustration, a single dose may be dissolved in 1 ml of isotonic NaCl solution and either added to 1000 ml of hypodermoclysis fluid or injected at the proposed site of infusion, (see for example, “Remington's Pharmaceutical Sciences” 15th Edition, pages 1035-1038 and 1570-1580). For human administration, preparations should meet sterility, pyrogenicity, general safety and purity standards as required by FDA standards. In certain embodiments, a pharmaceutical composition of the invention comprises or consists of a sterile saline solution and an RNAi construct described herein. In other embodiments, a pharmaceutical composition of the invention comprises or consists of an RNAi construct described herein and sterile water (e.g. water for injection, WFI). In still other embodiments, a pharmaceutical composition of the invention comprises or consists of an RNAi construct described herein and phosphate-buffered saline (PBS).

[0110] In some embodiments, the pharmaceutical compositions of the invention are packaged with or stored within a device for administration. Devices for injectable formulations include, but are not limited to, injection ports, pre-filled syringes, auto injectors, injection pumps, on-body injectors, and injection pens. Devices for aerosolized or powder formulations include, but are not limited to, inhalers, insufflators, aspirators, and the like. Thus, the present invention includes administration devices comprising a pharmaceutical composition of the invention for treating or preventing one or more of the disorders described herein.

### Methods for Inhibiting PNPLA3 Expression

[0111] The present invention also provides methods of inhibiting expression of a PNPLA3 gene in a cell. The methods include contacting a cell with an RNAi agent, e.g., double stranded RNAi agent, in an amount effective to inhibit expression of PNPLA3 in the cell, thereby inhibiting expression of PNPLA3 in the cell. Contacting of a cell with an RNAi agent, e.g., a double stranded RNAi agent, may be done in vitro or in vivo. Contacting a cell in vivo with the RNAi agent includes contacting a cell or group of cells within a subject, e.g., a human subject, with the RNAi agent. Combinations of in vitro and in vivo methods of contacting a cell are also possible.

[0112] The present invention provides methods for reducing or inhibiting expression of PNPLA3 in a subject in need thereof as well as methods of treating or preventing conditions, diseases, or disorders associated with PNPLA3 expression or activity. A “condition, disease, or disorder associated with PNPLA3 expression” refers to conditions, diseases, or disorders in which PNPLA3 expression levels are altered or where elevated expression levels of PNPLA3 are associated with an increased risk of developing the condition, disease or disorder.

[0113] Contacting a cell may be direct or indirect, as discussed above. Furthermore, contacting a cell may be accomplished via a targeting ligand, including any ligand described herein or known in the art. In preferred embodiments, the targeting ligand is a carbohydrate moiety, e.g., a GalNAc3 ligand, or any other ligand that directs the RNAi agent to a site of interest.

[0114] In one embodiment, contacting a cell with an RNAi includes “introducing” or “delivering the RNAi into the cell” by facilitating or effecting uptake or absorption into the cell. Absorption or uptake of an RNAi can occur through unaided diffusive or active cellular processes, or by auxiliary agents or devices. Introducing an RNAi into a cell may be in vitro and/or in vivo. For example, for in vivo introduction, RNAi can be injected into a tissue site or administered systemically. In vitro introduction into a cell includes methods known in the art such as electroporation and lipofection. Further approaches are described herein below and/or are known in the art.

[0115] The term “inhibiting,” as used herein, is used interchangeably with “reducing,” “silencing,” “downregulating”, “suppressing”, and other similar terms, and includes any level of inhibition.

[0116] The phrase “inhibiting expression of a PNPLA3” is intended to refer to inhibition of expression of any PNPLA3 gene (such as, e.g., a mouse PNPLA3 gene, a rat PNPLA3 gene, a monkey PNPLA3 gene, or a human PNPLA3 gene) as well as variants or mutants of a PNPLA3 gene. Thus, the PNPLA3 gene may be a wild-type PNPLA3 gene, a mutant PNPLA3 gene (such as a mutant PNPLA3 gene giving rise to amyloid deposition), or a transgenic PNPLA3 gene in the context of a genetically manipulated cell, group of cells, or organism.

[0117] “Inhibiting expression of a PNPLA3 gene” includes any level of inhibition of a PNPLA3 gene, e.g., at least partial suppression of the expression of a PNPLA3 gene. The expression of the PNPLA3 gene may be assessed based on the level, or the change in the level, of any variable associated with PNPLA3 gene expression, e.g., PNPLA3 mRNA level, PNPLA3 protein level, or the number or extent of amyloid deposits. This level may be assessed in an individual cell or in a group of cells, including, for example, a sample derived from a subject.

[0118] Inhibition may be assessed by a decrease in an absolute or relative level of one or more variables that are associated with PNPLA3 expression compared with a control level. The control level may be any type of control level that is utilized in the art, e.g., a pre-dose baseline level, or a level determined from a similar subject, cell, or sample that is untreated or treated with a control (such as, e.g., buffer only control or inactive agent control). In some embodiments of the methods of the invention, expression of a PNPLA3 gene is inhibited by at least about 5%, at least about 10%, at least about 15%, at least about 20%, at least about 25%, at least about 30%, at least about 35%, at least about 40%, at least about 45%, at least about 50%, at least about 55%, at least about 60%, at least about 65%, at least about 70%, at least about 75%, at least about 80%, at least about 85%, at least about 90%, at least about 91%, at least about 92%, at least about 93%, at least about 94%. at least about 95%, at least about 96%, at least about 97%, at least about 98%, or at least about 99%.

[0119] Inhibition of the expression of a PNPLA3 gene may be manifested by a reduction of the amount of mRNA expressed by a first cell or group of cells (such cells may be present, for example, in a sample derived from a subject) in which a PNPLA3 gene is transcribed and which has or have been treated (e.g., by contacting the cell or cells with an RNAi agent of the invention, or by administering an RNAi agent of the invention to a subject in which the cells are or were present) such that the expression of a PNPLA3 gene is inhibited, as compared to a second cell or group of cells substantially identical to the first cell or group of cells but which has not or have not been so treated (control cell(s)). In preferred embodiments, the inhibition is assessed by expressing the level of mRNA in treated cells as a percentage of the level of mRNA in control cells, using the following formula:

$$\frac{( mRNA in control cells ) - ( mRNA in treated cells )}{( mRNA in control cells )} \cdot 100 \%$$

[0120] Alternatively, inhibition of the expression of a PNPLA3 gene may be assessed in terms of a reduction of a parameter that is functionally linked to PNPLA3 gene expression, e.g., PNPLA3 protein expression or Hedgehog pathway protein activities. PNPLA3 gene silencing may be determined in any cell expressing PNPLA3, either constitutively or by genomic engineering, and by any assay known in the art.

[0121] Inhibition of the expression of a PNPLA3 protein may be manifested by a reduction in the level of the PNPLA3 protein that is expressed by a cell or group of cells (e.g., the level of protein expressed in a sample derived from a subject). As explained above, for the assessment of mRNA suppression, the inhibiton of protein expression levels in a treated cell or group of cells may similarly be expressed as a percentage of the level of protein in a control cell or group of cells.

[0122] A control cell or group of cells that may be used to assess the inhibition of the expression of a PNPLA3 gene includes a cell or group of cells that has not yet been contacted with an RNAi agent of the invention. For example, the control cell or group of cells may be derived from an individual subject (e.g., a human or animal subject) prior to treatment of the subject with an RNAi agent.

[0123] The level of PNPLA3 mRNA that is expressed by a cell or group of cells, or the level of circulating PNPLA3 mRNA, may be determined using any method known in the art for assessing mRNA expression. In one embodiment, the level of expression of PNPLA3 in a sample is determined by detecting a transcribed polynucleotide, or portion thereof, e.g., mRNA of the PNPLA3 gene. RNA may be extracted from cells using RNA extraction techniques including, for example, using acid phenol/guanidine isothiocyanate extraction (RNAzol B; Biogenesis), RNeasy RNA preparation kits (Qiagen) or PAXgene (PreAnalytix, Switzerland). Typical assay formats utilizing ribonucleic acid hybridization include nuclear run-on assays, RT-PCR, RNase protection assays (Melton et al., Nuc. Acids Res. 12:7035), Northern blotting, in situ hybridization, and microarray analysis. Circulating PNPLA3 mRNA may be detected using methods the described in PCT/US2012/043584, the entire contents of which are hereby incorporated herein by reference.

[0124] In one embodiment, the level of expression of PNPLA3 is determined using a nucleic acid probe. The term “probe”, as used herein, refers to any molecule that is capable of selectively binding to a specific PNPLA3. Probes can be synthesized by one of skill in the art, or derived from appropriate biological preparations. Probes may be specifically designed to be labeled. Examples of molecules that can be utilized as probes include, but are not limited to, RNA, DNA, proteins, antibodies, and organic molecules.

[0125] Isolated mRNA can be used in hybridization or amplification assays that include, but are not limited to, Southern or Northern analyses, polymerase chain reaction (PCR) analyses and probe arrays. One method for the determination of mRNA levels involves contacting the isolated mRNA with a nucleic acid molecule (probe) that can hybridize to PNPLA3 mRNA. In one embodiment, the mRNA is immobilized on a solid surface and contacted with a probe, for example by running the isolated mRNA on an agarose gel and transferring the mRNA from the gel to a membrane, such as nitrocellulose. In an alternative embodiment, the probe(s) are immobilized on a solid surface and the mRNA is contacted with the probe(s), for example, in an Affymetrix gene chip array. A skilled artisan can readily adapt known mRNA detection methods for use in determining the level of PNPLA3 mRNA.

[0126] An alternative method for determining the level of expression of PNPLA3 in a sample involves the process of nucleic acid amplification and/or reverse transcriptase (to prepare cDNA) of for example mRNA in the sample, e.g., by RT-PCR (the experimental embodiment set forth in Mullis, 1987, U.S. Pat. No. 4,683,202), ligase chain reaction (Barany (1991) Proc. Natl. Acad. Sci. USA 88: 189-193), self sustained sequence replication (Guatelli et al. (1990) Proc. Natl. Acad. Sci. USA 87: 1874-1878), transcriptional amplification system (Kwoh et al. (1989) Proc. Natl. Acad. Sci. USA 86: 1173-1177), Q-Beta Replicase (Lizardi et al. (1988) Bio/Technology 6: 1197), rolling circle replication (Lizardi et al., U.S. Pat. No. 5,854,033) or any other nucleic acid amplification method, followed by the detection of the amplified molecules using techniques well known to those of skill in the art. These detection schemes are especially useful for the detection of nucleic acid molecules if such molecules are present in very low numbers. In particular aspects of the invention, the level of expression of PNPLA3 is determined by quantitative fluorogenic RT-PCR {i.e., the TaqMan™ System). The expression levels of PNPLA3 mRNA may be monitored using a membrane blot (such as used in hybridization analysis such as Northern, Southern, dot, and the like), or microwells, sample tubes, gels, beads or fibers (or any solid support comprising bound nucleic acids). See U.S. Pat. Nos. 5,770,722, 5,874,219, 5,744,305, 5,677,195 and 5,445,934, which are incorporated herein by reference. The determination of PNPLA3 expression level may also comprise using nucleic acid probes in solution.

[0127] In preferred embodiments, the level of mRNA expression is assessed using branched DNA (bDNA) assays or real time PCR (qPCR). The use of these methods is described and exemplified in the Examples presented herein.

[0128] The level of PNPLA3 protein expression may be determined using any method known in the art for the measurement of protein levels. Such methods include, for example, electrophoresis, capillary electrophoresis, high performance liquid chromatography (HPLC), thin layer chromatography (TLC), hyperdiffusion chromatography, fluid or gel precipitin reactions, absorption spectroscopy, a colorimetric assays, spectrophotometric assays, flow cytometry, immunodiffusion (single or double), Immunoelectrophoresis, Western blotting, radioimmunoassay (MA), enzyme-linked immunosorbent assays (ELISAs), immunofluorescent assays, electrochemiluminescence assays, and the like.

[0129] In some embodiments, the efficacy of the methods of the invention can be monitored by detecting or monitoring a reduction in a symptom of a PNPLA3 disease, such as reduction in edema swelling of the extremities, face, larynx, upper respiratory tract, abdomen, trunk, and genitals, prodrome; laryngeal swelling; nonpruritic rash; nausea; vomiting; or abdominal pain. These symptoms may be assessed in vitro or in vivo using any method known in the art.

[0130] In some embodiments of the methods of the invention, the RNAi agent is administered to a subject such that the RNAi agent is delivered to a specific site within the subject. The inhibition of expression of PNPLA3 may be assessed using measurements of the level or change in the level of PNPLA3 mRNA or PNPLA3 protein in a sample derived from fluid or tissue from the specific site within the subject. In preferred embodiments, the site is selected from the group consisting of liver, choroid plexus, retina, and pancreas. The site may also be a subsection or subgroup of cells from any one of the aforementioned sites. The site may also include cells that express a particular type of receptor.

### Methods of Treating or Preventing PNPLA3-Associated Diseases

[0131] The present invention provides therapeutic and prophylactic methods which include administering to a subject with a PNPLA3-associated disease, disorder, and/or condition, or prone to developing, a PNPLA3-associated disease, disorder, and/or condition, compositions comprising an RNAi agent, or pharmaceutical compositions comprising an RNAi agent, or vectors comprising an RNAi of the invention. Non-limiting examples of PNPLA3-associated diseases include, for example, fatty liver (steatosis), nonalcoholic steatohepatitis (NASH), cirrhosis of the liver, accumulation of fat in the liver, inflammation of the liver, hepatocellular necrosis, liver fibrosis, obesity, or nonalcoholic fatty liver disease (NAFLD). In one embodiment, the PNPLA3-associated disease is NAFLD. In another embodiment, the PNPLA3-associated disease is NASH. In another embodiment, the PNPLA3-associated disease is fatty liver (steatosis). In another embodiment, the PNPLA3-associated disease is insulin resistance. In another embodiment, the PNPLA3-associated disease is not insulin resistance.

[0132] In certain embodiments, the present invention provides a method for reducing the expression of PNPLA3 in a patient in need thereof comprising administering to the patient any of the RNAi constructs described herein. The term “patient,” as used herein, refers to a mammal, including humans, and can be used interchangeably with the term “subject.” Preferably, the expression level of PNPLA3 in hepatocytes in the patient is reduced following administration of the RNAi construct as compared to the PNPLA3 expression level in a patient not receiving the RNAi construct.

[0133] The methods of the invention are useful for treating a subject having a PNPLA3-associated disease, e.g., a subject that would benefit from reduction in PNPLA3 gene expression and/or PNPLA3 protein production. In one aspect, the present invention provides methods of reducing the level of Patatin-Like Phospholipase Domain Containing 3 (PNPLA3) gene expression in a subject having nonalcoholic fatty liver disease (NAFLD). In another aspect, the present invention provides methods of reducing the level of PNPLA3 protein in a subject with NAFLD. The present invention also provides methods of reducing the level of activity of the hedgehog pathway in a subject with NAFLD.

[0134] In another aspect, the present invention provides methods of treating a subject having an NAFLD. In one aspect, the present invention provides methods of treating a subject having an PNPLA3-associated disease, e.g., fatty liver (steatosis), nonalcoholic steatohepatitis (NASH), cirrhosis of the liver, accumulation of fat in the liver, inflammation of the liver, hepatocellular necrosis, liver fibrosis, obesity, or nonalcoholic fatty liver disease (NAFLD). The treatment methods (and uses) of the invention include administering to the subject, e.g., a human, a therapeutically effective amount of an RNAi agent of the invention targeting a PNPLA3 gene or a pharmaceutical composition comprising an RNAi agent of the invention targeting a PNPLA3 gene or a vector of the invention comprising an RNAi agent targeting an PNPLA3 gene.

[0135] In one aspect, the invention provides methods of preventing at least one symptom in a subject having NAFLD, e.g., the presence of elevated hedgehog signaling pathways, fatigue, weakness, weight loss, loss of apetite, nausea, abdominal pain, spider-like blood vessels, yellowing of the skin and eyes (jaundice), itching, fluid build up and swelling of the legs (edema), abdomen swelling (ascites), and mental confusion. The methods include administering to the subject a therapeutically effective amount of the RNAi agent, e.g. dsRNA, pharmaceutical compositions, or vectors of the invention, thereby preventing at least one symptom in the subject having a disorder that would benefit from reduction in PNPLA3 gene expression.

[0136] In another aspect, the present invention provides uses of a therapeutically effective amount of an RNAi agent of the invention for treating a subject, e.g., a subject that would benefit from a reduction and/or inhibition of PNPLA3 gene expression. In a further aspect, the present invention provides uses of an RNAi agent, e.g., a dsRNA, of the invention targeting an PNPLA3 gene or pharmaceutical composition comprising an RNAi agent targeting an PNPLA3 gene in the manufacture of a medicament for treating a subject, e.g., a subject that would benefit from a reduction and/or inhibition of PNPLA3 gene expression and/or PNPLA3 protein production, such as a subject having a disorder that would benefit from reduction in PNPLA3 gene expression, e.g., a PNPLA3-associated disease.

[0137] In another aspect, the invention provides uses of an RNAi, e.g., a dsRNA, of the invention for preventing at least one symptom in a subject suffering from a disorder that would benefit from a reduction and/or inhibition of PNPLA3 gene expression and/or PNPLA3 protein production.

[0138] In a further aspect, the present invention provides uses of an RNAi agent of the invention in the manufacture of a medicament for preventing at least one symptom in a subject suffering from a disorder that would benefit from a reduction and/or inhibition of PNPLA3 gene expression and/or PNPLA3 protein production, such as a PNPLA3-associated disease.

[0139] In one embodiment, an RNAi agent targeting PNPLA3 is administered to a subject having a PNPLA3-associated disease, e.g., nonalcoholic fatty liver disease (NAFLD), such that the expression of a PNPLA3 gene, e.g., in a cell, tissue, blood or other tissue or fluid of the subject are reduced by at least about 10%, 11%, 12%, 13%, 14%, 15%, 16%, 17%, 18%, 19%, 20%, 21%, 22%, 23%, 24%, 25%, 26%, 27%, 28%, 29%, 30%, 31%, 32%, 33%, 34%, 35%, 36%, 37%, 38%, 39%, 40%, 41%, 42%, 43%, 44%, 45%, 46%, 47%, 48%, 49%, 50%, 51%, 52%, 53%, 54%, 55%, 56%, 57%, 58%, 59%, 60%, 61%, 62%, 62%, 64%, 65%, 66%, 67%, 68%, 69%, 70%, 71%, 72%, 73%, 74%, 75%, 76%, 77%, 78%, 79%, 80%, 81%, 82%, 83%, 84%, 85%, 86%, 87%, 88%, 89%, 90%, 91%, 92%, 93%, 94%, 95%, 96%, 97%, 98%, or at least about 99% or more when the dsRNA agent is administered to the subject.

[0140] The methods and uses of the invention include administering a composition described herein such that expression of the target PNPLA3 gene is decreased, such as for about 1, 2, 3, 4 5, 6, 7, 8, 12, 16, 18, 24, 28, 32, 36, 40, 44, 48, 52, 56, 60, 64, 68, 72, 76, or about 80 hours. In one embodiment, expression of the target PNPLA3 gene is decreased for an extended duration, e.g., at least about two, three, four, five, six, seven days or more, e.g., about one week, two weeks, three weeks, or about four weeks or longer.

[0141] Administration of the dsRNA according to the methods and uses of the invention may result in a reduction of the severity, signs, symptoms, and/or markers of such diseases or disorders in a patient with a PNPLA3-associated disease, e.g., nonalcoholic fatty liver disease (NAFLD). By “reduction” in this context is meant a statistically significant decrease in such level. The reduction can be, for example, at least about 5%, 10%, 15%, 20%, 25%, 30%, 35%, 40%, 45%, 50%, 55%, 60%, 65%, 70%, 75%, 80%, 85%, 90%, 95%, or about 100%. Efficacy of treatment or prevention of disease can be assessed, for example by measuring disease progression, disease remission, symptom severity, reduction in pain, quality of life, dose of a medication required to sustain a treatment effect, level of a disease marker or any other measurable parameter appropriate for a given disease being treated or targeted for prevention. It is well within the ability of one skilled in the art to monitor efficacy of treatment or prevention by measuring any one of such parameters, or any combination of parameters. For example, efficacy of treatment of NAFLD may be assessed, for example, by periodic monitoring of NAFLD symptoms, liver fat levels, or expression of downstream genes. Comparison of the later readings with the initial readings provide a physician an indication of whether the treatment is effective. It is well within the ability of one skilled in the art to monitor efficacy of treatment or prevention by measuring any one of such parameters, or any combination of parameters. In connection with the administration of an RNAi targeting PNPLA3 or pharmaceutical composition thereof, “effective against” an PNPLA3-associated disease indicates that administration in a clinically appropriate manner results in a beneficial effect for at least a statistically significant fraction of patients, such as improvement of symptoms, a cure, a reduction in disease, extension of life, improvement in quality of life, or other effect generally recognized as positive by medical doctors familiar with treating NAFLD and/or an PNPLA3-associated disease and the related causes.

[0142] A treatment or preventive effect is evident when there is a statistically significant improvement in one or more parameters of disease status, or by a failure to worsen or to develop symptoms where they would otherwise be anticipated. As an example, a favorable change of at least 10% in a measurable parameter of disease, and preferably at least 20%, 30%, 40%, 50% or more can be indicative of effective treatment. Efficacy for a given RNAi drug or formulation of that drug can also be judged using an experimental animal model for the given disease as known in the art. When using an experimental animal model, efficacy of treatment is evidenced when a statistically significant reduction in a marker or symptom is observed.

[0143] Subjects can be administered a therapeutic amount of RNAi, such as about 0.01 mg/kg, 0.02 mg/kg, 0.03 mg/kg, 0.04 mg/kg, 0.05 mg/kg, 0.1 mg/kg, 0.15 mg/kg, 0.2 mg/kg, 0.25 mg/kg, 0.3 mg/kg, 0.35 mg/kg, 0.4 mg/kg, 0.45 mg/kg, 0.5 mg/kg, 0.55 mg/kg, 0.6 mg/kg, 0.65 mg/kg, 0.7 mg/kg, 0.75 mg/kg, 0.8 mg/kg, 0.85 mg/kg, 0.9 mg/kg, 0.95 mg/kg, 1.0 mg/kg, 1.1 mg/kg, 1.2 mg/kg, 1.3 mg/kg, 1.4 mg/kg, 1.5 mg/kg, 1.6 mg/kg, 1.7 mg/kg, 1.8 mg/kg, 1.9 mg/kg, 2.0 mg/kg, 2.1 mg/kg, 2.2 mg/kg, 2.3 mg/kg, 2.4 mg/kg, 2.5 mg/kg dsRNA, 2.6 mg/kg dsRNA, 2.7 mg/kg dsRNA, 2.8 mg/kg dsRNA, 2.9 mg/kg dsRNA, 3.0 mg/kg dsRNA, 3.1 mg/kg dsRNA, 3.2 mg/kg dsRNA, 3.3 mg/kg dsRNA, 3.4 mg/kg dsRNA, 3.5 mg/kg dsRNA, 3.6 mg/kg dsRNA, 3.7 mg/kg dsRNA, 3.8 mg/kg dsRNA, 3.9 mg/kg dsRNA, 4.0 mg/kg dsRNA, 4.1 mg/kg dsRNA, 4.2 mg/kg dsRNA, 4.3 mg/kg dsRNA, 4.4 mg/kg dsRNA, 4.5 mg/kg dsRNA, 4.6 mg/kg dsRNA, 4.7 mg/kg dsRNA, 4.8 mg/kg dsRNA, 4.9 mg/kg dsRNA, 5.0 mg/kg dsRNA, 5.1 mg/kg dsRNA, 5.2 mg/kg dsRNA, 5.3 mg/kg dsRNA, 5.4 mg/kg dsRNA, 5.5 mg/kg dsRNA, 5.6 mg/kg dsRNA, 5.7 mg/kg dsRNA, 5.8 mg/kg dsRNA, 5.9 mg/kg dsRNA, 6.0 mg/kg dsRNA, 6.1 mg/kg dsRNA, 6.2 mg/kg dsRNA, 6.3 mg/kg dsRNA, 6.4 mg/kg dsRNA, 6.5 mg/kg dsRNA, 6.6 mg/kg dsRNA, 6.7 mg/kg dsRNA, 6.8 mg/kg dsRNA, 6.9 mg/kg dsRNA, 7.0 mg/kg dsRNA, 7.1 mg/kg dsRNA, 7.2 mg/kg dsRNA, 7.3 mg/kg dsRNA, 7.4 mg/kg dsRNA, 7.5 mg/kg dsRNA, 7.6 mg/kg dsRNA, 7.7 mg/kg dsRNA, 7.8 mg/kg dsRNA, 7.9 mg/kg dsRNA, 8.0 mg/kg dsRNA, 8.1 mg/kg dsRNA, 8.2 mg/kg dsRNA, 8.3 mg/kg dsRNA, 8.4 mg/kg dsRNA, 8.5 mg/kg dsRNA, 8.6 mg/kg dsRNA, 8.7 mg/kg dsRNA, 8.8 mg/kg dsRNA, 8.9 mg/kg dsRNA, 9.0 mg/kg dsRNA, 9.1 mg/kg dsRNA, 9.2 mg/kg dsRNA, 9.3 mg/kg dsRNA, 9.4 mg/kg dsRNA, 9.5 mg/kg dsRNA, 9.6 mg/kg dsRNA, 9.7 mg/kg dsRNA, 9.8 mg/kg dsRNA, 9.9 mg/kg dsRNA, 9.0 mg/kg dsRNA, 10 mg/kg dsRNA, 15 mg/kg dsRNA, 20 mg/kg dsRNA, 25 mg/kg dsRNA, 30 mg/kg dsRNA, 35 mg/kg dsRNA, 40 mg/kg dsRNA, 45 mg/kg dsRNA, or about 50 mg/kg dsRNA. In one embodiment, subjects can be administered 0.5 mg/kg of the dsRNA. Values and ranges intermediate to the recited values are also intended to be part of this invention.

[0144] Administration of the RNAi can reduce the presence of PNPLA3 protein levels, e.g., in a cell, tissue, blood, urine or other compartment of the patient by at least about 5%, 6%, 7%, 8%, 9%, 10%, 11%, 12%, 13%, 14%, 15%, 16%, 17%, 18%, 19%, 20%, 21%, 22%, 23%, 24%, 25%, 26%, 27%, 28%, 29%, 30%, 31%, 32%, 33%, 34%, 35%, 36%, 37%, 38%, 39%, 40%, 41%, 42%, 43%, 44%, 45%, 46%, 47%, 48%, 49%, 50%, 51%, 52%, 53%, 54%, 55%, 56%, 57%, 58%, 59%, 60%, 61%, 62%, 63%, 64%, 65%, 66%, 67%, 68%, 69%, 70%, 71%, 72%, 73%, 74%, 75%, 76%, 77%, 78%, 79%, 80%, 81%, 82%, 83%, 84%, 85%, 86%, 87%, 88%, 89%, 90%, 91%, 92%, 93%, 94%, 95%, 96%, 97%, 98%, or at least about 99% or more.

[0145] Before administration of a full dose of the RNAi, patients can be administered a smaller dose, such as a 5% infusion, and monitored for adverse effects, such as an allergic reaction. In another example, the patient can be monitored for unwanted immunostimulatory effects, such as increased cytokine (e.g., TNF-alpha or INF-alpha) levels.

[0146] Owing to the inhibitory effects on PNPLA3 expression, a composition according to the invention or a pharmaceutical composition prepared therefrom can enhance the quality of life.

[0147] An RNAi of the invention may be administered in “naked” form, where the modified or unmodified RNAi agent is directly suspended in aqueous or suitable buffer solvent, as a “free RNAi.” A free RNAi is administered in the absence of a pharmaceutical composition. The free RNAi may be in a suitable buffer solution. The buffer solution may comprise acetate, citrate, prolamine, carbonate, or phosphate, or any combination thereof. In one embodiment, the buffer solution is phosphate buffered saline (PBS). The pH and osmolality of the buffer solution containing the RNAi can be adjusted such that it is suitable for administering to a subject.

[0148] Alternatively, an RNAi of the invention may be administered as a pharmaceutical composition, such as a dsRNA liposomal formulation.

[0149] Subjects that would benefit from a reduction and/or inhibition of PNPLA3 gene expression are those having nonalcoholic fatty liver disease (NAFLD) and/or an PNPLA3-associated disease or disorder as described herein.

[0150] Treatment of a subject that would benefit from a reduction and/or inhibition of PNPLA3 gene expression includes therapeutic and prophylactic treatment.

[0151] The invention further provides methods and uses of an RNAi agent or a pharmaceutical composition thereof for treating a subject that would benefit from reduction and/or inhibition of PNPLA3 gene expression, e.g., a subject having a PNPLA3-associated disease, in combination with other pharmaceuticals and/or other therapeutic methods, e.g., with known pharmaceuticals and/or known therapeutic methods, such as, for example, those which are currently employed for treating these disorders.

[0152] For example, in certain embodiments, an RNAi targeting a PNPLA3 gene is administered in combination with, e.g., an agent useful in treating an PNPLA3-associated disease as described elsewhere herein. For example, additional therapeutics and therapeutic methods suitable for treating a subject that would benefit from reduction in PNPLA3 expression, e.g., a subject having a PNPLA3-associated disease, include an RNAi agent targeting a different portion of the PNPLA3 gene, a therapeutic agent, and/or procedures for treating a PNPLA3-associated disease or a combination of any of the foregoing.

[0153] In certain embodiments, a first RNAi agent targeting a PNPLA3 gene is administered in combination with a second RNAi agent targeting a different portion of the PNPLA3 gene. For example, the first RNAi agent comprises a first sense strand and a first antisense strand forming a double stranded region, wherein substantially all of the nucleotides of said first sense strand and substantially all of the nucleotides of the first antisense strand are modified nucleotides, wherein said first sense strand is conjugated to a ligand attached at the 3′-terminus, and wherein the ligand is one or more GalNAc derivatives attached through a bivalent or trivalent branched linker; and the second RNAi agent comprises a second sense strand and a second antisense strand forming a double stranded region, wherein substantially all of the nucleotides of the second sense strand and substantially all of the nucleotides of the second antisense strand are modified nucleotides, wherein the second sense strand is conjugated to a ligand attached at the 3′-terminus, and wherein the ligand is one or more GalNAc derivatives attached through a bivalent or trivalent branched linker.

[0154] In one embodiment, all of the nucleotides of the first and second sense strand and/or all of the nucleotides of the first and second antisense strand comprise a modification.

[0155] In one embodiment, the at least one of the modified nucleotides is selected from the group consisting of a 3′-terminal deoxy-thymine (dT) nucleotide, a 2′-O-methyl modified nucleotide, a 2′-fluoro modified nucleotide, a 2′-deoxy-modified nucleotide, a locked nucleotide, an unlocked nucleotide, a conformationally restricted nucleotide, a constrained ethyl nucleotide, an abasic nucleotide, a 2′-amino-modified nucleotide, a 2′-O-allyl-modified nucleotide, 2′-C-alkyl-modified nucleotide, 2′-hydroxly-modified nucleotide, a 2′-methoxyethyl modified nucleotide, a 2′-O-alkyl-modified nucleotide, a morpholino nucleotide, a phosphoramidate, a non-natural base comprising nucleotide, a tetrahydropyran modified nucleotide, a 1,5-anhydrohexitol modified nucleotide, a cyclohexenyl modified nucleotide, a nucleotide comprising a phosphorothioate group, a nucleotide comprising a methylphosphonate group, a nucleotide comprising a 5 ‘-phosphate, and a nucleotide comprising a 5’-phosphate mimic.

[0156] In certain embodiments, a first RNAi agent targeting a PNPLA3 gene is administered in combination with a second RNAi agent targeting a gene that is different from the PNPLA3 gene. For example, the RNAi agent targeting the PNPLA3 gene may be administered in combination with an RNAi agent targeting the SCAP gene. The first RNAi agent targeting a PNPLA3 gene and the second RNAi agent targeting a gene different from the PNPLA3 gene, e.g., the SCAP gene, may be administered as parts of the same pharmaceutical composition. Alternatively, the first RNAi agent targeting a PNPLA3 gene and the second RNAi agent targeting a gene different from the PNPLA3 gene, e.g., the SCAP gene, may be administered as parts of different pharmaceutical compositions.

[0157] The RNAi agent and an additional therapeutic agent and/or treatment may be administered at the same time and/or in the same combination, e.g., parenterally, or the additional therapeutic agent can be administered as part of a separate composition or at separate times and/or by another method known in the art or described herein.

[0158] The present invention also provides methods of using an RNAi agent of the invention and/or a composition containing an RNAi agent of the invention to reduce and/or inhibit PNPLA3 expression in a cell. In other aspects, the present invention provides an RNAi of the invention and/or a composition comprising an RNAi of the invention for use in reducing and/or inhibiting PNPLA3 gene expression in a cell. In yet other aspects, use of an RNAi of the invention and/or a composition comprising an RNAi of the invention for the manufacture of a medicament for reducing and/or inhibiting PNPLA3 gene expression in a cell are provided. In still other aspects, the present invention provides an RNAi of the invention and/or a composition comprising an RNAi of the invention for use in reducing and/or inhibiting PNPLA3 protein production in a cell. In yet other aspects, use of an RNAi of the invention and/or a composition comprising an RNAi of the invention for the manufacture of a medicament for reducing and/or inhibiting PNPLA3 protein production in a cell are provided. The methods and uses include contacting the cell with an RNAi, e.g., a dsRNA, of the invention and maintaining the cell for a time sufficient to obtain degradation of the mRNA transcript of an PNPLA3 gene, thereby inhibiting expression of the PNPLA3 gene or inhibiting PNPLA3 protein production in the cell.

[0159] Reduction in gene expression can be assessed by any methods known in the art. For example, a reduction in the expression of PNPLA3 may be determined by determining the mRNA expression level of PNPLA3 using methods routine to one of ordinary skill in the art, e.g., Northern blotting, qRT-PCR, by determining the protein level of PNPLA3 using methods routine to one of ordinary skill in the art, such as Western blotting, immunological techniques, flow cytometry methods, ELISA, and/or by determining a biological activity of PNPLA3.

[0160] In the methods and uses of the invention the cell may be contacted in vitro or in vivo, i.e., the cell may be within a subject.

[0161] A cell suitable for treatment using the methods of the invention may be any cell that expresses an PNPLA3 gene, e.g., a cell from a subject having NAFLD or a cell comprising an expression vector comprising a PNPLA3 gene or portion of a PNPLA3 gene. A cell suitable for use in the methods and uses of the invention may be a mammalian cell, e.g., a primate cell (such as a human cell or a non-human primate cell, e.g., a monkey cell or a chimpanzee cell), a non-primate cell (such as a cow cell, a pig cell, a camel cell, a llama cell, a horse cell, a goat cell, a rabbit cell, a sheep cell, a hamster, a guinea pig cell, a cat cell, a dog cell, a rat cell, a mouse cell, a lion cell, a tiger cell, a bear cell, or a buffalo cell), a bird cell (e.g., a duck cell or a goose cell), or a whale cell. In one embodiment, the cell is a human cell.

[0162] PNPLA3 gene expression may be inhibited in the cell by at least about 5%, 6%, 7%, 8%, 9%, 10%, 11%, 12%, 13%, 14%, 15%, 16%, 17%, 18%, 19%, 20%, 21%, 22%, 23%, 24%, 25%, 26%, 27%, 28%, 29%, 30%, 31%, 32%, 33%, 34%, 35%, 36%, 37%, 38%, 39%, 40%, 41%, 42%, 43%, 44%, 45%, 46%, 47%, 48%, 49%, 50%, 51%, 52%, 53%, 54%, 55%, 56%, 57%, 58%, 59%, 60%, 61%, 62%, 63%, 64%, 65%, 66%, 67%, 68%, 69%, 70%, 71%, 72%, 73%, 74%, 75%, 76%, 77%, 78%, 79%, 80%, 81%, 82%, 83%, 84%, 85%, 86%, 87%, 88%, 89%, 90%, 91%, 92%, 93%, 94%, 95%, 96%, 97%, 98%, 99%, or about 100%.

[0163] PNPLA3 protein production may be inhibited in the cell by at least about 5%, 6%, 7%, 8%, 9%, 10%, 11%, 12%, 13%, 14%, 15%, 16%, 17%, 18%, 19%, 20%, 21%, 22%, 23%, 24%, 25%, 26%, 27%, 28%, 29%, 30%, 31%, 32%, 33%, 34%, 35%, 36%, 37%, 38%, 39%, 40%, 41%, 42%, 43%, 44%, 45%, 46%, 47%, 48%, 49%, 50%, 51%, 52%, 53%, 54%, 55%, 56%, 57%, 58%, 59%, 60%, 61%, 62%, 63%, 64%, 65%, 66%, 67%, 68%, 69%, 70%, 71%, 72%, 73%, 74%, 75%, 76%, 77%, 78%, 79%, 80%, 81%, 82%, 83%, 84%, 85%, 86%, 87%, 88%, 89%, 90%, 91%, 92%, 93%, 94%, 95%, 96%, 97%, 98%, 99%, or about 100%.

[0164] The in vivo methods and uses of the invention may include administering to a subject a composition containing an RNAi, where the RNAi includes a nucleotide sequence that is complementary to at least a part of an RNA transcript of the PNPLA3 gene of the mammal to be treated. When the organism to be treated is a human, the composition can be administered by any means known in the art including, but not limited to subcutaneous, intravenous, oral, intraperitoneal, or parenteral routes, including intracranial (e.g., intraventricular, intraparenchymal and intrathecal), intramuscular, transdermal, airway (aerosol), nasal, rectal, and topical (including buccal and sublingual) administration. In certain embodiments, the compositions are administered by subcutaneous or intravenous infusion or injection. In one embodiment, the compositions are administered by subcutaneous injection.

[0165] In some embodiments, the administration is via a depot injection. A depot injection may release the RNAi in a consistent way over a prolonged time period. Thus, a depot injection may reduce the frequency of dosing needed to obtain a desired effect, e.g., a desired inhibition of PNPLA3, or a therapeutic or prophylactic effect. A depot injection may also provide more consistent serum concentrations. Depot injections may include subcutaneous injections or intramuscular injections. In preferred embodiments, the depot injection is a subcutaneous injection.

[0166] In some embodiments, the administration is via a pump. The pump may be an external pump or a surgically implanted pump. In certain embodiments, the pump is a subcutaneously implanted osmotic pump. In other embodiments, the pump is an infusion pump. An infusion pump may be used for intravenous, subcutaneous, arterial, or epidural infusions. In preferred embodiments, the infusion pump is a subcutaneous infusion pump. In other embodiments, the pump is a surgically implanted pump that delivers the RNAi to the subject.

[0167] The mode of administration may be chosen based upon whether local or systemic treatment is desired and based upon the area to be treated. The route and site of administration may be chosen to enhance targeting.

[0168] In one aspect, the present invention also provides methods for inhibiting the expression of an PNPLA3 gene in a mammal, e.g., a human. The present invention also provides a composition comprising an RNAi, e.g., a dsRNA, that targets an PNPLA3 gene in a cell of a mammal for use in inhibiting expression of the PNPLA3 gene in the mammal. In another aspect, the present invention provides use of an RNAi, e.g., a dsRNA, that targets an PNPLA3 gene in a cell of a mammal in the manufacture of a medicament for inhibiting expression of the PNPLA3 gene in the mammal.

[0169] The methods and uses include administering to the mammal, e.g., a human, a composition comprising an RNAi, e.g., a dsRNA, that targets an PNPLA3 gene in a cell of the mammal and maintaining the mammal for a time sufficient to obtain degradation of the mRNA transcript of the PNPLA3 gene, thereby inhibiting expression of the PNPLA3 gene in the mammal.

[0170] Reduction in gene expression can be assessed in peripheral blood sample of the RNAi-administered subject by any methods known it the art, e.g. qRT-PCR, described herein. Reduction in protein production can be assessed by any methods known it the art and by methods, e.g., ELISA or Western blotting, described herein. In one embodiment, a tissue sample serves as the tissue material for monitoring the reduction in PNPLA3 gene and/or protein expression. In another embodiment, a blood sample serves as the tissue material for monitoring the reduction in PNPLA3 gene and/or protein expression.

[0171] In one embodiment, verification of RISC medicated cleavage of target in vivo following administration of RNAi agent is done by performing 5′-RACE or modifications of the protocol as known in the art (Lasham A et al., (2010) Nucleic Acid Res., 38 (3) p-e19) (Zimmermann et al. (2006) Nature 441: 111-4).

[0172] It is understood that all ribonucleic acid sequences disclosed herein can be converted to deoxyribonucleic acid sequences by substituting a thymine base for a uracil base in the sequence. Likewise, all deoxyribonucleic acid sequences disclosed herein can be converted to ribonucleic acid sequences by substituting a uracil base for a thymine base in the sequence. Deoxyribonucleic acid sequences, ribonucleic acid sequences, and sequences containing mixtures of deoxyribonucleotides and ribonucleotides of all sequences disclosed herein are included in the invention.

[0173] Additionally, any nucleic acid sequences disclosed herein may be modified with any combination of chemical modifications. One of skill in the art will readily appreciate that such designation as “RNA” or “DNA” to describe modified polynucleotides is, in certain instances, arbitrary. For example, a polynucleotide comprising a nucleotide having a 2′-OH substituent on the ribose sugar and a thymine base could be described as a DNA molecule having a modified sugar (2′-OH for the natural 2′-H of DNA) or as an RNA molecule having a modified base (thymine (methylated uracil) for natural uracil of RNA).

[0174] Accordingly, nucleic acid sequences provided herein, including, but not limited to those in the sequence listing, are intended to encompass nucleic acids containing any combination of natural or modified RNA and/or DNA, including, but not limited to such nucleic acids having modified nucleobases. By way of a further example and without limitation, a polynucleotide having the sequence “ATCGATCG” encompasses any polynucleotides having such a sequence, whether modified or unmodified, including, but not limited to, such compounds comprising RNA bases, such as those having sequence “AUCGAUCG” and those having some DNA bases and some RNA bases such as “AUCGATCG” and polynucleotides having other modified bases, such as “ATmeCGAUCG,” wherein meC indicates a cytosine base comprising a methyl group at the 5-position.

[0175] The following examples, including the experiments conducted and the results achieved, are provided for illustrative purposes only and are not to be construed as limiting the scope of the appended claims.

### INCORPORATION BY REFERENCE

[0176] All publications, patents, and patent applications mentioned in this specification are herein incorporated by reference to the same extent as if each individual publication, patent, or patent application was specifically and individually indicated to be incorporated by reference. However, the citation of a reference herein should not be construed as an acknowledgement that such reference is prior art to the present invention. To the extent that any of the definitions or terms provided in the references incorporated by reference differ from the terms and discussion provided herein, the present terms and definitions control.

### EQUIVALENTS

[0177] The foregoing written specification is considered to be sufficient to enable one skilled in the art to practice the invention. The foregoing description and examples detail certain preferred embodiments of the invention and describe the best mode contemplated by the inventors. It will be appreciated, however, that no matter how detailed the foregoing may appear in text, the invention may be practiced in many ways and the invention should be construed in accordance with the appended claims and any equivalents thereof.

[0178] The following examples, including the experiments conducted and results achieved, are provided for illustrative purposes only and are not to be construed as limiting the present invention.

### Example 1: Selection, Design and Synthesis of Modified PNPLA3 siRNA Molecules

[0179] The identification and selection of optimal sequences for therapeutic siRNA molecules targeting patatin-like phospholipase domain-containing 3 (PNPLA3) were identified using bioinformatics analysis of a human PNPLA3 transcript (NM_025225.2). Table 1 shows sequences identified as having therapeutic properties. Throughout the various sequences, {INVAB} is an inverted A basic, {INVDA} is an inverted deoxythymidine, GNA is a glycol nucleic acid, dT is deoxythymidine and dC is deoxycytosine.

TABLE 1
siRNA sequences directed to PNPLA3

| | | SEQ | | |
|---|---|---|---|---|
| | | ID | | SEQ ID |
| Duplex | | NO: | | NO: |
| No. | Sense sequence (5′-3′) | (sense) | Antisense sequence (5′-3′) | (antisense) |
| D-1000 | GGGCAAUAAAGUACCUGCUUU | 1 | AGCAGGUACUUUAUUGCCCUU | 2 |
| D-1001 | CGGCCAAUGUCCACCAGCUUU | 3 | AGCUGGUGGACAUUGGCCGUU | 4 |
| D-1002 | GGUCCAGCCUGAACUUCUUUU | 5 | AAGAAGUUCAGGCUGGACCUU | 6 |
| D-1003 | GCUUCAUCCCCUUCUACAGUU | 7 | CUGUAGAAGGGGAUGAAGCUU | 8 |
| D-1004 | GCGGCUUCCUGGGCUUCUAUU | 9 | UAGAAGCCCAGGAAGCCGCUU | 10 |
| D-1005 | GCCUCUGAGCUGAGUUGGUUU | 11 | ACCAACUCAGCUCAGAGGCUU | 12 |
| D-1006 | GUGACAACGUACCCUUCAUUU | 13 | AUGAAGGGUACGUUGUCACUU | 14 |
| D-1007 | CCCGCCUCCAGGUCCCAAAUU | 15 | UUUGGGACCUGGAGGCGGGUU | 16 |
| D-1008 | CUUCAUCCCCUUCUACAGUUU | 17 | ACUGUAGAAGGGGAUGAAGUU | 18 |
| D-1009 | GGUAUGUUCCUGCUUCAUGUU | 19 | CAUGAAGCAGGAACAUACCUU | 20 |
| D-1010 | GUAUGUUCCUGCUUCAUGCUU | 21 | GCAUGAAGCAGGAACAUACUU | 22 |
| D-1011 | UAUGUUCCUGCUUCAUGCCUU | 23 | GGCAUGAAGCAGGAACAUAUU | 24 |
| D-1012 | AUGUUCCUGCUUCAUGCCCUU | 25 | GGGCAUGAAGCAGGAACAUUU | 26 |
| D-1013 | UGUUCCUGCUUCAUGCCCUUU | 27 | AGGGCAUGAAGCAGGAACAUU | 28 |
| D-1014 | GUUCCUGCUUCAUGCCCUUUU | 29 | AAGGGCAUGAAGCAGGAACUU | 30 |
| D-1015 | UUCCUGCUUCAUGCCCUUCUU | 31 | GAAGGGCAUGAAGCAGGAAUU | 32 |
| D-1016 | UCCUGCUUCAUGCCCUUCUUU | 33 | AGAAGGGCAUGAAGCAGGAUU | 34 |
| D-1017 | CCUGCUUCAUGCCCUUCUAUU | 35 | UAGAAGGGCAUGAAGCAGGUU | 36 |
| D-1018 | CUGCUUCAUGCCCUUCUACUU | 37 | GUAGAAGGGCAUGAAGCAGUU | 38 |
| D-1019 | UGCUUCAUGCCCUUCUACAUU | 39 | UGUAGAAGGGCAUGAAGCAUU | 40 |
| D-1020 | GCUUCAUGCCCUUCUACAGUU | 41 | CUGUAGAAGGGCAUGAAGCUU | 42 |
| D-1021 | CUUCAUGCCCUUCUACAGUUU | 43 | ACUGUAGAAGGGCAUGAAGUU | 44 |
| D-1022 | UUCAUGCCCUUCUACAGUGUU | 45 | CACUGUAGAAGGGCAUGAAUU | 46 |
| D-1023 | UCAUGCCCUUCUACAGUGGUU | 47 | CCACUGUAGAAGGGCAUGAUU | 48 |
| D-1024 | CAUGCCCUUCUACAGUGGCUU | 49 | GCCACUGUAGAAGGGCAUGUU | 50 |
| D-1025 | AUGCCCUUCUACAGUGGCCUU | 51 | GGCCACUGUAGAAGGGCAUUU | 52 |
| D-1026 | UGCCCUUCUACAGUGGCCUUU | 53 | AGGCCACUGUAGAAGGGCAUU | 54 |
| D-1027 | GCCCUUCUACAGUGGCCUUUU | 55 | AAGGCCACUGUAGAAGGGCUU | 56 |
| D-1028 | GGUAUGUUCCUGCUUCAUCUU | 57 | GAUGAAGCAGGAACAUACCUU | 58 |
| D-1029 | GUAUGUUCCUGCUUCAUCCUU | 59 | GGAUGAAGCAGGAACAUACUU | 60 |
| D-1030 | UAUGUUCCUGCUUCAUCCCUU | 61 | GGGAUGAAGCAGGAACAUAUU | 62 |
| D-1031 | AUGUUCCUGCUUCAUCCCCUU | 63 | GGGGAUGAAGCAGGAACAUUU | 64 |
| D-1032 | UGUUCCUGCUUCAUCCCCUUU | 65 | AGGGGAUGAAGCAGGAACAUU | 66 |
| D-1033 | GUUCCUGCUUCAUCCCCUUUU | 67 | AAGGGGAUGAAGCAGGAACUU | 68 |
| D-1034 | UUCCUGCUUCAUCCCCUUCUU | 69 | GAAGGGGAUGAAGCAGGAAUU | 70 |
| D-1035 | UCCUGCUUCAUCCCCUUCUUU | 71 | AGAAGGGGAUGAAGCAGGAUU | 72 |
| D-1036 | CCUGCUUCAUCCCCUUCUAUU | 73 | UAGAAGGGGAUGAAGCAGGUU | 74 |
| D-1037 | CUGCUUCAUCCCCUUCUACUU | 75 | GUAGAAGGGGAUGAAGCAGUU | 76 |
| D-1038 | UGCUUCAUCCCCUUCUACAUU | 77 | UGUAGAAGGGGAUGAAGCAUU | 78 |
| D-1039 | UUCAUCCCCUUCUACAGUGUU | 79 | CACUGUAGAAGGGGAUGAAUU | 80 |
| D-1040 | UCAUCCCCUUCUACAGUGGUU | 81 | CCACUGUAGAAGGGGAUGAUU | 82 |
| D-1041 | CAUCCCCUUCUACAGUGGCUU | 83 | GCCACUGUAGAAGGGGAUGUU | 84 |
| D-1042 | UCCCCUUCUACAGUGGCCUUU | 85 | AGGCCACUGUAGAAGGGGAUU | 86 |
| D-1043 | GAUCAGGACCCGAGCCGAUUU | 87 | AUCGGCUCGGGUCCUGAUCUU | 88 |
| D-1044 | UGGGCUUCUACCACGUCGUUU | 89 | ACGACGUGGUAGAAGCCCAUU | 90 |
| D-1045 | GAGCGAGCACGCCCCGCAUUU | 91 | AUGCGGGGCGUGCUCGCUCUU | 92 |
| D-1046 | UGCACUGCGUCGGCGUCCUUU | 93 | AGGACGCCGACGCAGUGCAUU | 94 |
| D-1047 | UGGAGCAGACUCUGCAGGUUU | 95 | ACCUGCAGAGUCUGCUCCAUU | 96 |
| D-1048 | UGCAGGUCCUCUCAGAUCUUU | 97 | AGAUCUGAGAGGACCUGCAUU | 98 |
| D-1049 | CCCGGCCAAUGUCCACCAUUU | 99 | AUGGUGGACAUUGGCCGGGUU | 100 |
| D-1050 | UUCUACAGUGGCCUUAUCUUU | 101 | AGAUAAGGCCACUGUAGAAUU | 102 |
| D-1051 | UCUACAGUGGCCUUAUCCUUU | 103 | AGGAUAAGGCCACUGUAGAUU | 104 |
| D-1052 | CUUCCUUCAGAGGCGUGCUUU | 105 | AGCACGCCUCUGAAGGAAGUU | 106 |
| D-1053 | UUCCUUCAGAGGCGUGCGAUU | 107 | UCGCACGCCUCUGAAGGAAUU | 108 |
| D-1054 | GCGUGCGAUAUGUGGAUGUUU | 109 | ACAUCCACAUAUCGCACGCUU | 110 |
| D-1055 | CGUGCGAUAUGUGGAUGGAUU | 111 | UCCAUCCACAUAUCGCACGUU | 112 |
| D-1056 | UGGAUGGAGGAGUGAGUGAUU | 113 | UCACUCACUCCUCCAUCCAUU | 114 |
| D-1057 | ACGUACCCUUCAUUGAUGUUU | 115 | ACAUCAAUGAAGGGUACGUUU | 116 |
| D-1058 | UGGACAUCACCAAGCUCAUUU | 117 | AUGAGCUUGGUGAUGUCCAUU | 118 |
| D-1059 | CACCUGCGUCUCAGCAUCUUU | 119 | AGAUGCUGAGACGCAGGUGUU | 120 |
| D-1060 | ACCUGCGUCUCAGCAUCCUUU | 121 | AGGAUGCUGAGACGCAGGUUU | 122 |
| D-1061 | CCAGAGACUGGUGACAUGUUU | 123 | ACAUGUCACCAGUCUCUGGUU | 124 |
| D-1062 | AUGGCUUCCAGAUAUGCCUUU | 125 | AGGCAUAUCUGGAAGCCAUUU | 126 |
| D-1063 | CCGCCUCCAGGUCCCAAAUUU | 127 | AUUUGGGACCUGGAGGCGGUU | 128 |
| D-1064 | UACCUGCUGGUGCUGAGGUUU | 129 | ACCUCAGCACCAGCAGGUAUU | 130 |
| D-1065 | ACCUGCUGGUGCUGAGGGUUU | 131 | ACCCUCAGCACCAGCAGGUUU | 132 |
| D-1066 | CUCUCCACCUUUCCCAGUUUU | 133 | AACUGGGAAAGGUGGAGAGUU | 134 |
| D-1067 | UUUUUCACCUAACUAAAAUUU | 135 | AUUUUAGUUAGGUGAAAAAUU | 136 |
| D-1068 | CGGCCAAUGUCCACCAGCUUU | 137 | AGCUGGUGGACAUUGGCCGUU | 138 |
| D-1069 | GGUCCAGCCUGAACUUCUUUU | 139 | AAGAAGUUCAGGCUGGACCUU | 140 |
| D-1070 | GCGGCUUCCUGGGCUUCUAUU | 141 | UAGAAGCCCAGGAAGCCGCUU | 142 |
| D-1071 | GUGACAACGUACCCUUCAUUU | 143 | AUGAAGGGUACGUUGUCACUU | 144 |
| D-1072 | GGUAUGUUCCUGCUUCAUGUU | 145 | CAUGAAGCAGGAACAUACCUU | 146 |
| D-1073 | GUAUGUUCCUGCUUCAUGCUU | 147 | GCAUGAAGCAGGAACAUACUU | 148 |
| D-1074 | UGUUCCUGCUUCAUGCCCUUU | 149 | AGGGCAUGAAGCAGGAACAUU | 150 |
| D-1075 | GUUCCUGCUUCAUGCCCUUUU | 151 | AAGGGCAUGAAGCAGGAACUU | 152 |
| D-1076 | CCUGCUUCAUGCCCUUCUAUU | 153 | UAGAAGGGCAUGAAGCAGGUU | 154 |
| D-1077 | GCUUCAUGCCCUUCUACAGUU | 155 | CUGUAGAAGGGCAUGAAGCUU | 156 |
| D-1078 | CUUCAUGCCCUUCUACAGUUU | 157 | ACUGUAGAAGGGCAUGAAGUU | 158 |
| D-1079 | UUCAUGCCCUUCUACAGUGUU | 159 | CACUGUAGAAGGGCAUGAAUU | 160 |
| D-1080 | AUGGCUUCCAGAUAUGCCUUU | 161 | AGGCAUAUCUGGAAGCCAUUU | 162 |
| D-1081 | AUGCCCUUCUACAGUGGCCUU | 163 | GGCCACUGUAGAAGGGCAUUU | 164 |
| D-1082 | GCUUCAUGCCCUUCUACAUUU | 165 | AUGUAGAAGGGCAUGAAGCUU | 166 |
| D-1083 | GGAAAGACUGUUCCAAAAAUU | 333 | UUUUUGGAACAGUCUUUCCUU | 334 |
| D-1084 | GGUAUGUUCCUGCUUCAUGUU | 335 | CAUGAAGCAGGAACAUACCUU | 336 |
| D-1085 | GUAUGUUCCUGCUUCAUGCUU | 337 | GCAUGAAGCAGGAACAUACUU | 338 |
| D-1086 | UGUUCCUGCUUCAUGCCCUUU | 339 | AGGGCAUGAAGCAGGAACAUU | 340 |
| D-1087 | GCUUCAUGCCCUUCUACAGUU | 341 | CUGUAGAAGGGCAUGAAGCUU | 342 |
| D-1088 | CUUCAUGCCCUUCUACAGUUU | 343 | ACUGUAGAAGGGCAUGAAGUU | 344 |
| D-1089 | GCGGCUUCCUGGGCUUCUAUU | 345 | UAGAAGCCCAGGAAGCCGCUU | 346 |
| D-1090 | GUUCCUGCUUCAUGCCCUUUU | 347 | AAGGGCAUGAAGCAGGAACUU | 348 |
| D-1091 | AUGGCUUCCAGAUAUGCCUUU | 349 | AGGCAUAUCUGGAAGCCAUUU | 350 |
| D-1092 | CCUGCUUCAUGCCCUUCUAUU | 351 | UAGAAGGGCAUGAAGCAGGUU | 352 |
| D-1093 | UUCAUGCCCUUCUACAGUUUU | 353 | AACUGUAGAAGGGCAUGAAUU | 354 |
| D-1094 | UUCAUGCCCUUCUACAGUGUU | 355 | CACUGUAGAAGGGCAUGAAUU | 356 |
| D-1095 | GCUUCAUGCCCUUCUACAUUU | 357 | AUGUAGAAGGGCAUGAAGCUU | 358 |
| D-1096 | GGUCCAGCCUGAACUUCUUUU | 359 | AAGAAGUUCAGGCUGGACCUU | 360 |
| D-1097 | GCGGCUUCCUGGGCUUCUAUU | 361 | UAGAAGCCCAGGAAGCCGCUU | 362 |
| D-1098 | GCGGCUUCCUGGGCUUCUAUU | 363 | UAGAAGCCCAGGAAGCCGCUU | 364 |
| D-1099 | GUUCCUGCUUCAUGCCCUUUU | 365 | AAGGGCAUGAAGCAGGAACUU | 366 |
| D-1100 | GUUCCUGCUUCAUGCCCUUUU | 367 | AAGGGCAUGAAGCAGGAACUU | 368 |
| D-1101 | CCUGCUUCAUGCCCUUCUAUU | 369 | UAGAAGGGCAUGAAGCAGGUU | 370 |
| D-1102 | CCUGCUUCAUGCCCUUCUAUU | 371 | UAGAAGGGCAUGAAGCAGGUU | 372 |
| D-1103 | AUGCCCUUCUACAGUGGCCUU | 373 | GGCCACUGUAGAAGGGCAUUU | 374 |
| D-1104 | AUGGCUUCCAGAUAUGCCUUU | 375 | AGGCAUAUCUGGAAGCCAUUU | 376 |
| D-1105 | GUGACAACGUACCCUUCAUUU | 377 | AUGAAGGGUACGUUGUCACUU | 378 |
| D-1106 | GUAUGUUCCUGCUUCAUGCUU | 379 | GCAUGAAGCAGGAACAUACUU | 380 |
| D-1107 | GUAUGUUCCUGCUUCAUGCUU | 381 | GCAUGAAGCAGGAACAUACUU | 382 |
| D-1108 | GUAUGUUCCUGCUUCAUGCUU | 383 | GCAUGAAGCAGGAACAUACUU | 384 |
| D-1109 | GUAUGUUCCUGCUUCAUGCCU | 385 | AGGCAUGAAGCAGGAACAUACUU | 386 |
| D-1110 | UGGUAUGUUCCUGCUUCAUGU | 387 | GCAUGAAGCAGGAACAUACCAUU | 388 |
| D-1111 | GUAUGUUCCUGCUUCAUGU | 389 | GCAUGAAGCAGGAACAUACUU | 390 |
| D-1112 | GUAUGUUCCUGCUUCAUGC{INVAB} | 391 | GCAUGAAGCAGGAACAUACUU | 392 |
| D-1113 | GCUUCAUGCCCUUCUACAUUU | 393 | AUGUAGAAGGGCAUGAAGCUU | 394 |
| D-1114 | GCUUCAUGCCCUUCUACAUUU | 395 | AUGUAGAAGGGCAUGAAGCUU | 396 |
| D-1115 | GCUUCAUGCCCUUCUACAUUU | 397 | AUGUAGAAGGGCAUGAAGCUU | 398 |
| D-1116 | GCUUCAUGCCCUUCUACAUUU | 399 | AUGUAGAAGGGCAUGAAGCUU | 400 |
| D-1117 | GCUUCAUGCCCUUCUACAUUU | 401 | AUGUAGAAGGGCAUGAAGCUU | 402 |
| D-1118 | GCUUCAUGCCCUUCUACAUUU | 403 | AUGUAGAAGGGCAUGAAGCUU | 404 |
| D-1119 | GCUUCAUGCCCUUCUACAUUU | 405 | AUGUAGAAGGGCAUGAAGCUU | 406 |
| D-1120 | GCUUCAUGCCCUUCUACAUUU | 407 | AUGUAGAAGGGCAUGAAGCUU | 408 |
| D-1121 | GCUUCAUGCCCUUCUACAUUU | 409 | AUGUAGAAGGGCAUGAAGCUU | 410 |
| D-1122 | GCUUCAUGCCCUUCUACAUUU | 411 | AUGUAGAAGGGCAUGAAGCUU | 412 |
| D-1123 | GCUUCAUGCCCUUCUACAUUU | 413 | AUGUAGAAGGGCAUGAAGCUU | 414 |
| D-1124 | GCUUCAUGCCCUUCUACAUUU | 415 | AUGUAGAAGGGCAUGAAGCUU | 416 |
| D-1125 | GCUUCAUGCCCUUCUACAUUU | 417 | AUGUAGAAGGGCAUGAAGCUU | 418 |
| D-1126 | GCUUCAUGCCCUUCUACAUUU | 419 | AUGUAGAAGGGCAUGAAGCUU | 420 |
| D-1127 | GCUUCAUGCCCUUCUACAUUU | 421 | AUGUAGAAGGGCAUGAAGCUU | 422 |
| D-1128 | GCUUCAUGCCCUUCUACAUUU | 423 | AUGUAGAAGGGCAUGAAGCUU | 424 |
| D-1129 | GCUUCAUG[DC]CCUUCUACAUUU | 425 | AUGUAGAAGGGCAUGAAGCUU | 426 |
| D-1130 | GCUUCAUGCC[DC]UUCUACAUUU | 427 | AUGUAGAAGGGCAUGAAGCUU | 428 |
| D-1131 | GCUUCAUGC[DC]CUUCUACAUUU | 429 | AUGUAGAAGGGCAUGAAGCUU | 430 |
| D-1132 | GCUUCAUGCCCUUCUACAUUU | 431 | AUGUAGAAGGGCAUGAAGCUU | 432 |
| D-1133 | GCUUCAUGCCCUUCUACAUUU | 433 | AUGUAGAAGGGCAUGAAGCUU | 434 |
| D-1134 | GCUUCAUGCCCUUCUACAUUU | 435 | AUGUAGAAGGGCAUGAAGCUU | 436 |
| D-1135 | GCUUCAUGCCCUUCUACAUUU | 437 | AUGUAGAAGGGCAUGAAGCUU | 438 |
| D-1136 | GCUUCAUGCCCUUCUACAUUU | 439 | AUGUAGAAGGGCAUGAAGCUU | 440 |
| D-1137 | GCUUCAUGCCCUUCUACAGUU | 441 | AACUGUAGAAGGGCAUGAAGCUU | 442 |
| D-1138 | CUGCUUCAUGCCCUUCUACAU | 443 | AUGUAGAAGGGCAUGAAGCAGUU | 444 |
| D-1139 | GCUUCAUGCCCUUCUACAU | 445 | AUGUAGAAGGGCAUGAAGCUU | 446 |
| D-1140 | GCUUCAUGCCCUUCUACAU{INVAB} | 447 | AUGUAGAAGGGCAUGAAGCUU | 448 |
| D-1141 | GCUUCAUGCCCUUCUACAUUU{INVAB} | 449 | AUGUAGAAGGGCAUGAAGCUU | 450 |
| D-1142 | GCUUCAUGCCCUUCUACAUUU | 451 | AUGUAGAAGGGCAUGAAGCUU | 452 |
| D-1143 | GCUUCAUGCCCUUCUACAUUU | 453 | AUGUAGAAGGGCAUGAAGCUU | 454 |
| D-1144 | GCUUCAUGCCCUUCUACAUUU | 455 | AUGUAGAAGGGCAUGAAGCUU | 456 |
| D-1145 | GCUUCAUGCCCUUCUACAUUU | 457 | AUGUAGAAGGGCAUGAAGCUU | 458 |
| D-1146 | GCUUCAUGCCCUUCUACAUUU | 459 | AUGUAGAAGGGCAUGAAGCUU | 460 |
| D-1147 | GCUUCAUGCCCUUCUACAUUU | 461 | AUGUAGAAGGGCAUGAAGCUU | 462 |
| D-1148 | GCUUCAUGCCCUUCUACAUUU | 463 | AUGUAGAAGGGCAUGAAGCUU | 464 |
| D-1149 | GCUUCAUGCCCUUCUACAUUU | 465 | AUGUAGAAGGGCAUGAAGCUU | 466 |
| D-1150 | GCUUCAUGCCCUUCUACAUUU | 467 | AUGUAGAAGGGCAUGAAGCUU | 468 |
| D-1151 | GUAUGUUCCUGCUUCAUGCUU{INVAB} | 469 | GCAUGAAGCAGGAACAUACUU | 470 |
| D-1152 | GGUAUGUUCCUGCUUCAUUUU | 471 | AAUGAAGCAGGAACAUACCUU | 472 |
| D-1153 | GUAUGUUCCUGCUUCAUGUUU | 473 | ACAUGAAGCAGGAACAUACUU | 474 |
| D-1154 | CGGCCAAUGUCCACCAGCUUU | 475 | AGCUGGUGGACAUUGGCCGUU | 476 |
| D-1155 | UGGAGCAGACUCUGCAGGUUU | 477 | ACCUGCAGAGUCUGCUCCAUU | 478 |
| D-1156 | ACGUACCCUUCAUUGAUGUUU | 479 | ACAUCAAUGAAGGGUACGUUU | 480 |
| D-1157 | CCAGAGACUGGUGACAUGUUU | 481 | ACAUGUCACCAGUCUCUGGUU | 482 |
| D-1158 | [INVAB]GCUUCAUGCCUUUCUACAUUU | 483 | AUGUAGAAAGGCAUGAAGCUU | 484 |
| D-1159 | [INVAB]GCUUCAUGCCUUUCUACAUUU | 485 | AAAUGUAGAAAGGCAUGAAGCUU | 486 |
| D-1160 | [INVAB]GCUUCAUGCCUUUCUACAUUU | 487 | AAAUGUAGAAAGGCAUGAAGCUU | 488 |
| D-1161 | UGCUUCAUGCCUUUCUACAUU | 489 | UGUAGAAAGGCAUGAAGCAUU | 490 |
| D-1162 | UAUGUUCCUGCUUCAUGCUUU | 491 | AGCAUGAAGCAGGAACAUAUU | 492 |
| D-1163 | UUCCUGCUUCAUGCCUUUUUU | 493 | AAAAGGCAUGAAGCAGGAAUU | 494 |
| D-1164 | UCAUGCCUUUCUACAGUGUUU | 495 | ACACUGUAGAAAGGCAUGAUU | 496 |
| D-1165 | CAUGCCUUUCUACAGUGGUUU | 497 | ACCACUGUAGAAAGGCAUGUU | 498 |
| D-1166 | AUGCCUUUCUACAGUGGCUUU | 499 | AGCCACUGUAGAAAGGCAUUU | 500 |
| D-1167 | GGUAUGUUCCUGCUUCAUAUU | 501 | UAUGAAGCAGGAACAUACCUU | 502 |
| D-1168 | GUAUGUUCCUGCUUCAUGAUU | 503 | UCAUGAAGCAGGAACAUACUU | 504 |
| D-1169 | UAUGUUCCUGCUUCAUGCAUU | 505 | UGCAUGAAGCAGGAACAUAUU | 506 |
| D-1170 | UUCCUGCUUCAUGCCUUUAUU | 507 | UAAAGGCAUGAAGCAGGAAUU | 508 |
| D-1171 | CUGCUUCAUGCCUUUCUAAUU | 509 | UUAGAAAGGCAUGAAGCAGUU | 510 |
| D-1172 | GCUUCAUGCCUUUCUACAAUU | 511 | UUGUAGAAAGGCAUGAAGCUU | 512 |
| D-1173 | UUCAUGCCUUUCUACAGUAUU | 513 | UACUGUAGAAAGGCAUGAAUU | 514 |
| D-1174 | UCAUGCCUUUCUACAGUGAUU | 515 | UCACUGUAGAAAGGCAUGAUU | 516 |
| D-1175 | CAUGCCUUUCUACAGUGGAUU | 517 | UCCACUGUAGAAAGGCAUGUU | 518 |
| D-1176 | AUGCCUUUCUACAGUGGCAUU | 519 | UGCCACUGUAGAAAGGCAUUU | 520 |
| D-1177 | ACGUACCCUUCAUUGAUGAUU | 521 | UCAUCAAUGAAGGGUACGUUU | 522 |
| D-1178 | CCAGAGACUGGUGACAUGAUU | 523 | UCAUGUCACCAGUCUCUGGUU | 524 |
| D-1179 | AUGGCUUCCAGAUAUGCCAUU | 525 | UGGCAUAUCUGGAAGCCAUUU | 526 |
| D-1180 | GUUCCUGCUUCAUGCCUUUUU | 527 | AAAGGCAUGAAGCAGGAACUU | 528 |
| D-1181 | CCUGCUUCAUGCCUUUCUAUU | 529 | UAGAAAGGCAUGAAGCAGGUU | 530 |
| D-1182 | GCUUCAUGCCUUUCUACAUUU | 531 | AUGUAGAAAGGCAUGAAGCUU | 532 |
| D-1183 | CUUCAUGCCUUUCUACAGUUU | 533 | ACUGUAGAAAGGCAUGAAGUU | 534 |
| D-1184 | UUCAUGCCUUUCUACAGUUUU | 535 | AACUGUAGAAAGGCAUGAAUU | 536 |
| D-1185 | GCUUCAUCCCUUUCUACAUUU | 537 | AUGUAGAAAGGGAUGAAGCUU | 538 |
| D-1186 | [INVAB]GCUUCAUGCCCUUCUACAUUU | 539 | AUGUAGAAGGGCAUGAAGCUU | 540 |
| D-1187 | [INVAB]GCUUCAUGCCCUUCUACAUUU | 541 | AAAUGUAGAAGGGCAUGAAGCUU | 542 |
| D-1188 | [INVAB]GCUUCAUGCCCUUCUACAUUU | 543 | AAAUGUAGAAGGGCAUGAAGCUU | 544 |
| D-1189 | [INVAB]GCGGCUUCCUGGGCUUCUAUU | 545 | UAGAAGCCCAGGAAGCCGCUU | 546 |
| D-1190 | [INVAB]CUGCGGCUUCCUGGGCUUCUA | 547 | UAGAAGCCCAGGAAGCCGCAGUU | 548 |
| D-1191 | CUGCGGCUUCCUGGGCUUCU{INVAB} | 549 | UAGAAGCCCAGGAAGCCGCAGUU | 550 |
| D-1192 | [INVAB]CUGCGGCUUCCUGGGCUUCUA | 551 | UAGAAGCCCAGGAAGCCGCAGUU | 552 |
| D-1193 | [INVAB]GCGGCUUCCUGGGCUUCUAUU | 553 | UAGAAGCCCAGGAAGCCGCUU | 554 |
| D-1194 | CUGCGGCUUCCUGGGCUUCU{INVAB} | 555 | UAGAAGCCCAGGAAGCCGCAGUU | 556 |
| D-1195 | [INVAB]CUGCGGCUUCCUGGGCUUCUA | 557 | UAGAAGCCCAGGAAGCCGCAGUU | 558 |
| D-1196 | [INVAB]GCGGCUUCCUGGGCUUCUAUU | 559 | UAGAAGCCCAGGAAGCCGCUU | 560 |
| D-1197 | CUGCGGCUUCCUGGGCUUCU{INVAB} | 561 | UAGAAGCCCAGGAAGCCGCAGUU | 562 |
| D-1198 | [INVAB]CUGCGGCUUCCUGGGCUUCUA | 563 | UAGAAGCCCAGGAAGCCGCAGUU | 564 |
| D-1199 | [INVAB]GCGGCUUCCUGGGCUUCUAUU | 565 | UAGAAGCCCAGGAAGCCGCUU | 566 |
| D-1200 | [INVAB]CUGCGGCUUCCUGGGCUUCUA | 567 | UAGAAGCCCAGGAAGCCGCAGUU | 568 |
| D-1201 | [INVAB]CUGCGGCUUCCUGGGCUUCUA | 569 | UAGAAGCCCAGGAAGCCGCAGUU | 570 |
| D-1202 | [INVAB]CUGCGGCUUCCUGGGCUUCUA | 571 | UAGAAGCCCAGGAAGCCGCAGUU | 572 |
| D-1203 | [INVAB]AUGGCUUCCAGAUAUGCCUUU | 573 | AGGCAUAUCUGGAAGCCAUUU | 574 |
| D-1204 | [INVAB]ACAUGGCUUCCAGAUAUGCCU | 575 | AGGCAUAUCUGGAAGCCAUGUUU | 576 |
| D-1205 | ACAUGGCUUCCAGAUAUGCC{INVAB} | 577 | AGGCAUAUCUGGAAGCCAUGUUU | 578 |
| D-1206 | [INVAB]ACAUGGCUUCCAGAUAUGCCU | 579 | AGGCAUAUCUGGAAGCCAUGUUU | 580 |
| D-1207 | [INVAB]AUGGCUUCCAGAUAUGCCUUU | 581 | AGGCAUAUCUGGAAGCCAUUU | 582 |
| D-1208 | ACAUGGCUUCCAGAUAUGCC{INVAB} | 583 | AGGCAUAUCUGGAAGCCAUGUUU | 584 |
| D-1209 | [INVAB]ACAUGGCUUCCAGAUAUGCCU | 585 | AGGCAUAUCUGGAAGCCAUGUUU | 586 |
| D-1210 | [INVAB]AUGGCUUCCAGAUAUGCCUUU | 587 | AGGCAUAUCUGGAAGCCAUUU | 588 |
| D-1211 | ACAUGGCUUCCAGAUAUGCC{INVAB} | 589 | AGGCAUAUCUGGAAGCCAUGUUU | 590 |
| D-1212 | [INVAB]ACAUGGCUUCCAGAUAUGCCU | 591 | AGGCAUAUCUGGAAGCCAUGUUU | 592 |
| D-1213 | [INVAB]AUGGCUUCCAGAUAUGCCUUU | 593 | AGGCAUAUCUGGAAGCCAUUU | 594 |
| D-1214 | ACAUGGCUUCCAGAUAUGCC{INVAB} | 595 | AGGCAUAUCUGGAAGCCAUGUUU | 596 |
| D-1215 | [INVAB]ACAUGGCUUCCAGAUAUGCCU | 597 | AGGCAUAUCUGGAAGCCAUGUUU | 598 |
| D-1216 | [INVAB]ACAUGGCUUCCAGAUAUGCCU | 599 | AGGCAUAUCUGGAAGCCAUGUUU | 600 |
| D-1217 | [INVAB]ACAUGGCUUCCAGAUAUGCCU | 601 | AGGCAUAUCUGGAAGCCAUGUUU | 602 |
| D-1218 | [INVAB]ACAUGGCUUCCAGAUAUGCCU | 603 | AGGCAUAUCUGGAAGCCAUGUUU | 604 |
| D-1219 | [INVAB]ACGUACCCUUCAUUGAUGUUU | 605 | ACAUCAAUGAAGGGUACGUUU | 606 |
| D-1220 | [INVAB]CAACGUACCCUUCAUUGAUGU | 607 | ACAUCAAUGAAGGGUACGUUGUU | 608 |
| D-1221 | [INVAB]CAACGUACCCUUCAUUGAUGU | 609 | ACAUCAAUGAAGGGUACGUUGUU | 610 |
| D-1222 | [INVAB]ACGUACCCUUCAUUGAUGUUU | 611 | ACAUCAAUGAAGGGUACGUUU | 612 |
| D-1223 | CAACGUACCCUUCAUUGAUG{INVAB} | 613 | ACAUCAAUGAAGGGUACGUUGUU | 614 |
| D-1224 | [INVAB]ACGUACCCUUCAUUGAUGUUU | 615 | ACAUCAAUGAAGGGUACGUUU | 616 |
| D-1225 | CAACGUACCCUUCAUUGAUG{INVAB} | 617 | ACAUCAAUGAAGGGUACGUUGUU | 618 |
| D-1226 | [INVAB]CAACGUACCCUUCAUUGAUGU | 619 | ACAUCAAUGAAGGGUACGUUGUU | 620 |
| D-1227 | [INVAB]ACGUACCCUUCAUUGAUGUUU | 621 | ACAUCAAUGAAGGGUACGUUU | 622 |
| D-1228 | CAACGUACCCUUCAUUGAUG{INVAB} | 623 | ACAUCAAUGAAGGGUACGUUGUU | 624 |
| D-1229 | [INVAB]CAACGUACCCUUCAUUGAUGU | 625 | ACAUCAAUGAAGGGUACGUUGUU | 626 |
| D-1230 | [INVAB]CAACGUACCCUUCAUUGAUGU | 627 | ACAUCAAUGAAGGGUACGUUGUU | 628 |
| D-1231 | [INVAB]CAACGUACCCUUCAUUGAUGU | 629 | ACAUCAAUGAAGGGUACGUUGUU | 630 |
| D-1232 | [INVAB]CAACGUACCCUUCAUUGAUGU | 631 | ACAUCAAUGAAGGGUACGUUGUU | 632 |
| D-1233 | CUGCUUCAUGCCUUUCUACAU | 633 | AUGUAGAAAGGCAUGAAGCAGUU | 634 |
| D-1234 | CUGCUUCAUGCCUUUCUACAU | 635 | AUGUAGAAAGGCAUGAAGCAGUU | 636 |
| D-1235 | [INVAB]GCUUCAUGCCUUUCUACAUUU | 637 | AUGUAGAAAGGCAUGAAGCUU | 638 |
| D-1236 | [INVAB]GCUUCAUGCCUUUCUACAUUU | 639 | AUGUAGAAAGGCAUGAAGCUU | 640 |
| D-1237 | CUGCUUCAUGCCUUUCUACAU | 641 | AUGUAGAAAGGCAUGAAGCAGUU | 642 |
| D-1238 | CUGCUUCAUGCCUUUCUACAU | 643 | AUGUAGAAAGGCAUGAAGCAGUU | 644 |
| D-1239 | [INVAB]CUGCUUCAUGCCUUUCUACAU | 645 | AUGUAGAAAGGCAUGAAGCAGUU | 646 |
| D-1240 | CUGCUUCAUGCCUUUCUACA{INVAB} | 647 | AUGUAGAAAGGCAUGAAGCAGUU | 648 |
| D-1241 | [INVAB]CUGCUUCAUGCCUUUCUACAU | 649 | AUGUAGAAAGGCAUGAAGCAGUU | 650 |
| D-1242 | [INVAB]CUGCUUCAUGCUUUCUACAU | 651 | AUGUAGAAAGGCAUGAAGCAGUU | 652 |
| D-1243 | CUGCUUCAUGCCUUUCUACAU | 653 | AUGUAGAAAGGCAUGAAGCAGUU | 654 |
| D-1244 | [INVAB]CUGCUUCAUGCCUUUCUACAU | 655 | AUGUAGAAAGGCAUGAAGCAGUU | 656 |
| D-1245 | CUGCUUCAUGCCUUUCUACAU | 657 | AUGUAGAAAGGCAUGAAGCAGUU | 658 |
| D-1246 | CUGCUUCAUGCCUUUCUACA{INVAB} | 659 | AUGUAGAAAGGCAUGAAGCAGUU | 660 |
| D-1247 | [INVAB]CUGCUUCAUGCCUUUCUACAU | 661 | AUGUAGAAAGGCAUGAAGCAGUU | 662 |
| D-1248 | CUGCUUCAUGCCUUUCUACAU | 663 | AUGUAGAAAGGCAUGAAGCAGUU | 664 |
| D-1249 | CUGCUUCAUGCCUUUCUACA{INVAB} | 665 | AUGUAGAAAGGCAUGAAGCAGUU | 666 |
| D-1250 | [INVAB]CUGCUUCAUGCCUUUCUACAU | 667 | AUGUAGAAAGGCAUGAAGCAGUU | 668 |
| D-1251 | CUGCUUCAUGCCUUUCUACA{INVAB} | 669 | AUGUAGAAAGGCAUGAAGCAGUU | 670 |
| D-1252 | [INVAB]CUGCUUCAUGCCUUUCUACAU | 671 | AUGUAGAAAGGCAUGAAGCAGUU | 672 |
| D-1253 | [INVAB]GCUUCAUGCCUUUCUACAUUU | 673 | AUGUAGAAAGGCAUGAAGCUU | 674 |
| D-1254 | [INVAB]GCUUCAUGCCUUUCUACAUUU | 675 | AUGUAGAAAGGCAUGAAGCUU | 676 |
| D-1255 | [INVAB]GCUUCAUGCCUUUCUACAUUU | 677 | AUGUAGAAAGGCAUGAAGCUU | 678 |
| D-1256 | [INVAB]GCUUCAUGCCUUUCUACAUUU | 679 | AUGUAGAAAGGCAUGAAGCUU | 680 |
| D-1257 | [INVAB]GCUUCAUGCCUUUCUACAUUU | 681 | AUGUAGAAAGGCAUGAAGCUU | 682 |
| D-1258 | CUGCUUCAUGCCCUUCUACAU | 683 | AUGUAGAAGGGCAUGAAGCAGUU | 684 |
| D-1259 | [INVAB]GCUUCAUGCCCUUCUACAUUU | 685 | AUGUAGAAGGGCAUGAAGCUU | 686 |
| D-1260 | [INVAB]GCUUCAUGCCCUUCUACAUUU | 687 | AUGUAGAAGGGCAUGAAGCUU | 688 |
| D-1261 | [INVAB]GCUUCAUGCCCUUCUACAUUU | 689 | AUGUAGAAGGGCAUGAAGCUU | 690 |
| D-1262 | CUGCUUCAUGCCCUUCUACA{INVAB} | 691 | AUGUAGAAGGGCAUGAAGCAGUU | 692 |
| D-1263 | [INVAB]CUGCUUCAUGCCCUUCUACAU | 693 | AUGUAGAAGGGCAUGAAGCAGUU | 694 |
| D-1264 | [INVAB]GCUUCAUGCCCUUCUACAUUU | 695 | AUGUAGAAGGGCAUGAAGCUU | 696 |
| D-1265 | AUGUUCCUGCUUCAUGCCUUU | 697 | AGGCAUGAAGCAGGAACAUUU | 698 |
| D-1266 | UGUUCCUGCUUCAUGCCUUUU | 699 | AAGGCAUGAAGCAGGAACAUU | 700 |
| D-1267 | UGCCUUUCUACAGUGGCCUUU | 701 | AGGCCACUGUAGAAAGGCAUU | 702 |
| D-1268 | CGUACUUCGUCCUUGUAUGUU | 703 | CAUACAAGGACGAAGUACGUU | 704 |
| D-1269 | [INVAB]GCUUCAUGCCUUCUACAUUU | 705 | AUGUAGAAGGGCAUGAAGCUU | 706 |
| D-1270 | [INVAB]GCUUCAUGCCCUUCUACAUUU | 707 | AUGUAGAAGGGCAUGAAGCUU | 708 |
| D-1271 | [INVAB]GCUUCAUGCCCUUCUACAUUU | 709 | AUGUAGAAGGGCAUGAAGCUU | 710 |
| D-1272 | [INVAB]GCUUCAUGCCCUUCUACAUUU | 711 | AUGUAGAAGGGCAUGAAGCUU | 712 |
| D-1273 | [INVAB]GCUUCAUGCCCUUCUACAUUU | 713 | AUGUAGAAGGGCAUGAAGCUU | 714 |
| D-1274 | [INVAB]GCUUCAUGCCCUUCUACAUUU | 715 | AUGUAGAAGGGCAUGAAGCUU | 716 |
| D-1275 | [INVAB]CCUGCUUCAUGCCUUUCUAUU | 717 | UAGAAAGGCAUGAAGCAGGUU | 718 |
| D-1276 | [INVAB]CCUGCUUCAUGCCUUUCUAUU | 719 | UAGAAAGGCAUGAAGCAGGUU | 720 |
| D-1277 | UUCCUGCUUCAUGCCUUUCU{INVAB} | 721 | UAGAAAGGCAUGAAGCAGGAAUU | 722 |
| D-1278 | [INVAB]CCUGCUUCAUGCCUUUCUAUU | 723 | UAGAAAGGCAUGAAGCAGGUU | 724 |
| D-1279 | UUCCUGCUUCAUGCCUUUCU{INVAB} | 725 | UAGAAAGGCAUGAAGCAGGAAUU | 726 |
| D-1280 | [INVAB]AUGCCUUUCUACAGUGGCUUU | 727 | AGCCACUGUAGAAAGGCAUUU | 728 |
| D-1281 | [INVAB]AUGCCUUUCUACAGUGGCUUU | 729 | AGCCACUGUAGAAAGGCAUUU | 730 |
| D-1282 | [INVAB]AUGCCUUUCUACAGUGGCUUU | 731 | AGCCACUGUAGAAAGGCAUUU | 732 |
| D-1283 | UCAUGCCUUUCUACAGUGGC{INVAB} | 733 | AGCCACUGUAGAAAGGCAUGAUU | 734 |
| D-1284 | [INVAB]AUGCCUUUCUACAGUGGCUUU | 735 | AGCCACUGUAGAAAGGCAUUU | 736 |
| D-1285 | [INVAB]UCAUGCCUUUCUACAGUGGCU | 737 | AGCCACUGUAGAAAGGCAUGAUU | 738 |
| D-1286 | [INVAB]UGCUUCAUGCCUUUCUACAGU | 739 | ACUGUAGAAAGGCAUGAAGCAUU | 740 |
| D-1287 | [INVAB]CUUCAUGCCUUUCUACAGUUU | 741 | ACUGUAGAAAGGCAUGAAGUU | 742 |
| D-1289 | UGCUUCAUGCCUUUCUACAG{INVAB} | 743 | ACUGUAGAAAGGCAUGAAGCAUU | 744 |
| D-1290 | [INVAB]CUUCAUGCCUUUCUACAGUUU | 745 | ACUGUAGAAAGGCAUGAAGUU | 746 |
| D-1291 | UGCUUCAUGCCUUUCUACAG{INVAB} | 747 | ACUGUAGAAAGGCAUGAAGCAUU | 748 |
| D-1292 | [INVAB]UGCUUCAUGCCUUUCUACAGU | 749 | ACUGUAGAAAGGCAUGAAGCAUU | 750 |
| D-1293 | [INVAB]UGCUUCAUGCCUUUCUACAGU | 751 | ACUGUAGAAAGGCAUGAAGCAUU | 752 |
| D-1294 | [INVAB]UGCUUCAUGCCUUUCUACAGU | 753 | ACUGUAGAAAGGCAUGAAGCAUU | 754 |
| D-1295 | [INVAB]UGCUUCAUGCCUUUCUACAGU | 755 | ACUGUAGAAAGGCAUGAAGCAUU | 756 |
| D-1296 | [INVAB]GUUCCUGCUUCAUGCCUUUUU | 757 | AAAGGCAUGAAGCAGGAACUU | 758 |
| D-1297 | [INVAB]CCUGCUUCAUGCCUUUCUAUU | 759 | UAGAAAGGCAUGAAGCAGGUU | 760 |
| D-1298 | [INVAB]CUUCAUGCCUUUCUACAGUUU | 761 | ACUGUAGAAAGGCAUGAAGUU | 762 |
| D-1299 | [INVAB]UUCCUGCUUCAUGCCUUUCUA | 763 | UAGAAAGGCAUGAAGCAGGAAUU | 764 |
| D-1300 | UUCCUGCUUCAUGCCUUUCU{INVAB} | 765 | UAGAAAGGCAUGAAGCAGGAAUU | 766 |
| D-1301 | [INVAB]UUCCUGCUUCAUGCCUUUCUA | 767 | UAGAAAGGCAUGAAGCAGGAAUU | 768 |
| D-1302 | UUCCUGCUUCAUGCCUUUCU{INVAB} | 769 | UAGAAAGGCAUGAAGCAGGAAUU | 770 |
| D-1303 | [INVAB]UUCCUGCUUCAUGCCUUUCUA | 771 | UAGAAAGGCAUGAAGCAGGAAUU | 772 |
| D-1304 | [INVAB]UUCCUGCUUCAUGCCUUUCUA | 773 | UAGAAAGGCAUGAAGCAGGAAUU | 774 |
| D-1305 | [INVAB]UUCCUGCUUCAUGCCUUUCUA | 775 | UAGAAAGGCAUGAAGCAGGAAUU | 776 |
| D-1306 | [INVAB]UUCCUGCUUCAUGCCUUUCUA | 777 | UAGAAAGGCAUGAAGCAGGAAUU | 778 |
| D-1307 | [INVAB]UUCCUGCUUCAUGCCUUUCUA | 779 | UAGAAAGGCAUGAAGCAGGAAUU | 780 |
| D-1308 | [INVAB]UUCCUGCUUCAUGCCUUUCUA | 781 | UAGAAAGGCAUGAAGCAGGAAUU | 782 |
| D-1309 | [INVAB]UCAUGCCUUUCUACAGUGGCU | 783 | AGCCACUGUAGAAAGGCAUGAUU | 784 |
| D-1310 | UCAUGCCUUUCUACAGUGGC{INVAB} | 785 | AGCCACUGUAGAAAGGCAUGAUU | 786 |
| D-1311 | [INVAB]UCAUGCCUUUCUACAGUGGCU | 787 | AGCCACUGUAGAAAGGCAUGAUU | 788 |
| D-1312 | UCAUGCCUUUCUACAGUGGC{INVAB} | 789 | AGCCACUGUAGAAAGGCAUGAUU | 790 |
| D-1313 | [INVAB]UCAUGCCUUUCUACAGUGGCU | 791 | AGCCACUGUAGAAAGGCAUGAUU | 792 |
| D-1314 | [INVAB]UCAUGCCUUUCUACAGUGGCU | 793 | AGCCACUGUAGAAAGGCAUGAUU | 794 |
| D-1315 | UCAUGCCUUUCUACAGUGGC{INVAB} | 795 | AGCCACUGUAGAAAGGCAUGAUU | 796 |
| D-1316 | [INVAB]UCAUGCCUUUCUACAGUGGCU | 797 | AGCCACUGUAGAAAGGCAUGAUU | 798 |
| D-1317 | [INVAB]UCAUGCCUUUCUACAGUGGCU | 799 | AGCCACUGUAGAAAGGCAUGAUU | 800 |
| D-1318 | [INVAB]UCAUGCCUUUCUACAGUGGCU | 801 | AGCCACUGUAGAAAGGCAUGAUU | 802 |
| D-1319 | [INVAB]UGCUUCAUGCCUUUCUACAGU | 803 | ACUGUAGAAAGGCAUGAAGCAUU | 804 |
| D-1320 | UGCUUCAUGCCUUUCUACAG{INVAB} | 805 | ACUGUAGAAAGGCAUGAAGCAUU | 806 |
| D-1321 | UGCUUCAUGCCUUUCUACAG{INVAB} | 807 | ACUGUAGAAAGGCAUGAAGCAUU | 808 |
| D-1322 | [INVAB]UGCUUCAUGCCUUUCUACAGU | 809 | ACUGUAGAAAGGCAUGAAGCAUU | 810 |
| D-1323 | [INVAB]CUUCAUGCCUUUCUACAGUUU | 811 | ACUGUAGAAAGGCAUGAAGUU | 812 |
| D-1324 | [INVAB]UGCUUCAUGCCUUUCUACAGU | 813 | ACUGUAGAAAGGCAUGAAGCAUU | 814 |
| D-1325 | [INVAB]GCUUCAUGCCUUUCUACAUUU | 815 | AUGUAGAAAGGCAUGAAGCUU | 816 |
| D-1326 | [INVAB]CAUGCCUUUCUACAGUGGUUU | 817 | ACCACUGUAGAAAGGCAUGUU | 818 |
| D-1327 | [INVAB]CUGCUUCAUGCCUUUCUAAUU | 819 | UUAGAAAGGCAUGAAGCAGUU | 820 |
| D-1328 | [INVAB]GCUUCAUGCCUUUCUACAAUU | 821 | UUGUAGAAAGGCAUGAAGCUU | 822 |
| D-1329 | [INVAB]UUCAUGCCUUUCUACAGUAUU | 823 | UACUGUAGAAAGGCAUGAAUU | 824 |
| D-1330 | [INVAB]GUUCCUGCUUCAUGCCUUUUU | 825 | AAAGGCAUGAAGCAGGAACUU | 826 |
| D-1331 | AUGUUCCUGCUUCAUGCCUU{INVAB} | 827 | AAAGGCAUGAAGCAGGAACAUUU | 828 |
| D-1332 | [INVAB]AUGUUCCUGCUUCAUGCCUUU | 829 | AAAGGCAUGAAGCAGGAACAUUU | 830 |
| D-1333 | [INVAB]GUUCCUGCUUCAUGCCUUUUU | 831 | AAAGGCAUGAAGCAGGAACUU | 832 |
| D-1334 | AUGUUCCUGCUUCAUGCCUU{INVAB} | 833 | AAAGGCAUGAAGCAGGAACAUUU | 834 |
| D-1335 | [INVAB]AUGUUCCUGCUUCAUGCCUUU | 835 | AAAGGCAUGAAGCAGGAACAUUU | 836 |
| D-1336 | [INVAB]GUUCCUGCUUCAUGCCUUUUU | 837 | AAAGGCAUGAAGCAGGAACUU | 838 |
| D-1337 | AUGUUCCUGCUUCAUGCCUU{INVAB} | 839 | AAAGGCAUGAAGCAGGAACAUUU | 840 |
| D-1338 | [INVAB]AUGUUCCUGCUUCAUGCCUUU | 841 | AAAGGCAUGAAGCAGGAACAUUU | 842 |
| D-1339 | [INVAB]AUGUUCCUGCUUCAUGCCUUU | 843 | AAAGGCAUGAAGCAGGAACAUUU | 844 |
| D-1340 | [INVAB]AUGUUCCUGCUUCAUGCCUUU | 845 | AAAGGCAUGAAGCAGGAACAUUU | 846 |
| D-1341 | [INVAB]GCUUCAUGCCUUUCUACAGUA | 847 | UACUGUAGAAAGGCAUGAAGCUU | 848 |
| D-1342 | [INVAB]GCUUCAUGCCUUUCUACAGUA | 849 | UACUGUAGAAAGGCAUGAAGCUU | 850 |
| D-1343 | [INVAB]UUCAUGCCUUUCUACAGUAUU | 851 | UACUGUAGAAAGGCAUGAAUU | 852 |
| D-1344 | [INVAB]GCUUCAUGCCUUUCUACAGUA | 853 | UACUGUAGAAAGGCAUGAAGCUU | 854 |
| D-1345 | GCUUCAUGCCUUUCUACAGU{INVAB} | 855 | UACUGUAGAAAGGCAUGAAGCUU | 856 |
| D-1346 | [INVAB]GCGGCUUCCUGGGCUUCUAUU | 857 | UAGAAGCCCAGGAAGCCGCUU | 858 |
| D-1347 | [INVAB]AUGGCUUCCAGAUAUGCCUUU | 859 | AGGCAUAUCUGGAAGCCAUUU | 860 |
| D-1348 | [INVAB]ACAUGGCUUCCAGAUAUGCCU | 861 | AGGCAUAUCUGGAAGCCAUGUUU | 862 |
| D-1349 | [INVAB]ACAUGGCUUCCAGAUAUGCCU | 863 | AGGCAUAUCUGGAAGCCAUGUUU | 864 |
| D-1350 | [INVAB]CAACGUACCCUUCAUUGAUGU | 865 | ACAUCAAUGAAGGGUACGUUGUU | 866 |
| D-1351 | [INVAB]CAACGUACCCUUCAUUGAUGU | 867 | ACAUCAAUGAAGGGUACGUUGUU | 868 |
| D-1352 | [INVAB]ACGUACCCUUCAUUGAUGUUU | 869 | ACAUCAAUGAAGGGUACGUUU | 870 |
| D-1353 | CUGCUUCAUGCCUUUCUACA{INVAB} | 871 | AUGUAGAAAGGCAUGAAGCAGUU | 872 |
| D-1354 | [INVAB]CUGCUUCAUGCCUUUCUACAU | 873 | AUGUAGAAAGGCAUGAAGCAGUU | 874 |
| D-1355 | [INVAB]GCUUCAUGCCUUUCUACAUUU | 875 | AUGUAGAAAGGCAUGAAGCUU | 876 |
| D-1356 | CUGCUUCAUGCCUUUCUACA{INVAB} | 877 | AUGUAGAAAGGCAUGAAGCAGUU | 878 |
| D-1357 | [INVAB]CUGCUUCAUGCCUUUCUACAU | 879 | AUGUAGAAAGGCAUGAAGCAGUU | 880 |
| D-1358 | CUGCUUCAUGCCUUUCUACA{INVAB} | 881 | AUGUAGAAAGGCAUGAAGCAGUU | 882 |
| D-1359 | [INVAB]CUGCUUCAUGCCUUUCUACA{INVAB} | 883 | AUGUAGAAAGGCAUGAAGCAGUU | 884 |
| D-1360 | [INVAB]GCUUCAUGCCUUUCUACAUUU | 885 | AUGUAGAAAGGCAUGAAGCUU | 886 |
| D-1361 | [INVAB]CUUCAUGCCUUUCUACAGUUU | 887 | ACUGUAGAAAGGCAUGAAGUU | 888 |
| D-1362 | UGCUUCAUGCCUUUCUACAG{INVAB} | 889 | ACUGUAGAAAGGCAUGAAGCAUU | 890 |
| D-1363 | [INVAB]CUGCUUCAUGCCUUUCUACAU | 891 | AUGUAGAAAGGCAUGAAGCAGUU | 892 |
| D-1364 | CUGCUUCAUGCCUUUCUACA{INVAB} | 893 | AUGUAGAAAGGCAUGAAGCAGUU | 894 |
| D-1365 | CUGCUUCAUGCCUUUCUACA{INVAB} | 895 | AUGUAGAAAGGCAUGAAGCAGUU | 896 |
| D-1366 | [INVAB]CUUCAUCCCUUUCUACAGUUU | 897 | ACUGUAGAAAGGGAUGAAGUU | 898 |
| D-1367 | [INVAB]GCUUCAUCCCUUUCUACAUUU | 899 | AUGUAGAAAGGGAUGAAGCUU | 900 |
| D-1368 | UGCUUCAUCCCUUUCUACAG{INVAB} | 901 | ACUGUAGAAAGGGAUGAAGCAUU | 902 |
| D-1369 | CUGCUUCAUCCCUUUCUACA{INVAB} | 903 | AUGUAGAAAGGGAUGAAGCAGUU | 904 |
| D-1370 | [INVAB]ACAUUGCUCUUUCACCUGAUU | 905 | UCAGGUGAAAGAGCAAUGUUU | 906 |
| D-1371 | CUGCUUCAUGCCUUUCUACA{INVAB} | 907 | AUGUAGAAAGGCAUGAAGCAGUU | 908 |
| D-1372 | CUGCUUCAUGCCUUUCUACA{INVAB} | 909 | AUGUAGAAAGGCAUGAAGCAGUU | 910 |
| D-1373 | CUGCUUCAUGCCUUUCUACA{INVAB} | 911 | AUGUAGAAAGGCAUGAAGCAGUU | 912 |
| D-1374 | CUGCUUCAUGCCUUUCUACA{INVAB} | 913 | AUGUAGAAAGGCAUGAAGCAGUU | 914 |
| D-1375 | CUGCUUCAUGCCUUUCUACA{INVAB} | 915 | AUGUAGAAAGGCAUGAAGCAGUU | 916 |
| D-1376 | CUGCUUCAUGCCUUUCUACA{INVAB} | 917 | AUGUAGAAAGGCAUGAAGCAGUU | 918 |
| D-1377 | CUGCUUCAUGCCUUUCUACA{INVAB} | 919 | AUGUAGAAAGGCAUGAAGCAGUU | 920 |
| D-1378 | CUGCUUCAUGCCUUUCUACA{INVAB} | 921 | AUGUAGAAAGGCAUGAAGCAGUU | 922 |
| D-1379 | CUGCUUCAUGCCUUUCUACA{INVAB} | 923 | AUGUAGAAAGGCAUGAAGCAGUU | 924 |
| D-1380 | CUGCUUCAUGCCUUUCUACA{INVAB} | 925 | AUGUAGAAAGGCAUGAAGCAGUU | 926 |
| D-1381 | CUGCUUCAUGCCUUUCUACA{INVAB} | 927 | AUGUAGAAAGGCAUGAAGCAGUU | 928 |
| D-1381 | [INVAB]CUUCAUGCC[DT]UUCUACAGUUU | 929 | ACUGUAGAAAGGCAUGAAGUU | 930 |
| D-1382 | [INVAB]CUUCAUGCCUUUCUACAGUUU | 931 | ACUGUAGAAAGGCAUGAAGUU | 932 |
| D-1383 | [INVAB]CUUCAUGCCUUUCUACAGUUU | 933 | ACUGUAGAAAGGCAUGAAGUU | 934 |
| D-1384 | [INVAB]CUUCAUGCCUUUCUACAGUUU | 935 | ACUGUAGAAAGGCAUGAAGUU | 936 |
| D-1385 | [INVAB]CUUCAUGCCUUUCUACAGUUU | 937 | ACUGUAGAAAGGCAUGAAGUU | 938 |
| D-1386 | [INVAB]CUUCAUGC[DC]UUUCUACAGUUU | 939 | ACUGUAGAAAGGCAUGAAGUU | 940 |
| D-1387 | [INVAB]CUUCAUGCCU[DT]UCUACAGUUU | 941 | ACUGUAGAAAGGCAUGAAGUU | 942 |
| D-1388 | [INVAB]GCUUCAUGGGAUUCUACAUUU | 943 | AUGUAGAAUCCCAUGAAGCUU | 944 |
| D-1389 | [INVAB]CUUCAUGCGAAUCUACAGUUU | 945 | ACUGUAGAUUCGCAUGAAGUU | 946 |
| D-1390 | CUGCUUCAUGCCUUUCUACA{INVAB} | 947 | UUGUAGAAAGGCAUGAAGCAGUU | 948 |
| D-1391 | [INVAB]CUGCUUCAUGCCUUUCUACAA | 949 | UUGUAGAAAGGCAUGAAGCAGUU | 950 |
| D-1392 | CUGCUUCAUGCCUUUCUACA{INVDA} | 951 | UUGUAGAAAGGCAUGAAGCAGUU | 952 |
| D-1393 | CUGCUUCAUGGGAUUCUACA{INVAB} | 953 | AUGUAGAAUCCCAUGAAGCAGUU | 954 |
| D-1394 | [INVAB]CUGCUUCAUGGGAUUCUACAU | 955 | AUGUAGAAUCCCAUGAAGCAGUU | 956 |
| D-1395 | [INVAB]CUUCAUGCCUUUCUACAGUUU | 957 | ACUGUAGAAAGGCAUGAAGUU | 958 |
| D-1396 | [INVAB]CUUCAUGCCUUUCUACAGUUU | 959 | ACUGUAGAAAGGCAUGAAGUU | 960 |
| D-1397 | [INVAB]GCUUCAUGCCUUUCUACAUUU | 961 | AUGUAGAAAGGCAUGAAGCUU | 962 |
| D-1398 | [INVAB]UGCUUCAUGCCUUUCUACAG{INVAB} | 963 | ACUGUAGAAAGGCAUGAAGCAUU | 964 |
| D-1399 | [INVAB]CUUCAUGCCUUUCUACAGUUU | 965 | ACUGUAGAAAGGCAUGAAGUU | 966 |
| D-1400 | UGCUUCAUGCCUUUCUACAG{INVAB} | 967 | ACUGUAGAAAGGCAUGAAGCAUU | 968 |
| D-1401 | UGCUUCAUGCCUUUCUACAG{INVAB} | 969 | ACUGUAGAAAGGCAUGAAGCAUU | 970 |
| D-1402 | UGCUUCAUGCCUUUCUACAG{INVAB} | 971 | ACUGUAGAAAGGCAUGAAGCAUU | 972 |
| D-1403 | [INVAB]CUUCAUGCCUUUCUACAGUUU | 973 | ACUGUAGAAAGGCAUGAAGUU | 974 |
| D-1404 | UGCUUCAUGCCUUUCUACAG{INVAB} | 975 | ACUGUAGAAAGGCAUGAAGCAUU | 976 |
| D-1405 | AUGCCUUUCUACAGUGGCUU{INVAB} | 977 | AGCCACUGUAGAAAGGCAUGAUU | 978 |
| D-1406 | UCAUGCCUUUCUACAGUGGC{INVAB} | 979 | AGCCACUGUAGAAAGGCAUGAUU | 980 |
| D-1407 | [INVAB]AUGCCUUUCUACAGUGGCUUU | 981 | AGCCACUGUAGAAAGGCAUUU | 982 |
| D-1408 | [INVAB]AUGCCUUUCUACAGUGGCUUU | 983 | AGCCACUGUAGAAAGGCAUUU | 984 |
| D-1409 | [INVAB]UCAUGCCUUUCUACAGUGGCU | 985 | AGCCACUGUAGAAAGGCAUGAUU | 986 |
| D-1410 | UCAUGCCUUUCUACAGUGGC{INVAB} | 987 | AGCCACUGUAGAAAGGCAUGAUU | 988 |
| D-1411 | [INVAB]AUGCCUUUCUACAGUGGCUUU | 989 | AGCCACUGUAGAAAGGCAUUU | 990 |
| D-1412 | UCAUGCCUUUCUACAGUGGC{INVAB} | 991 | AGCCACUGUAGAAAGGCAUGAUU | 992 |
| D-1413 | UCAUGCCUUUCUACAGUGGC{INVAB} | 993 | AGCCACUGUAGAAAGGCAUGAUU | 994 |
| D-1414 | [INVAB]UCAUGCCUUUCUACAGUGGC{INVAB} | 995 | AGCCACUGUAGAAAGGCAUGAUU | 996 |
| D-1415 | [INVAB]AUGCCUUUCUACAGUGGCAUU | 997 | UGCCACUGUAGAAAGGCAUUU | 998 |
| D-1416 | UCAUGCCUUUCUACAGUGGC{INVAB} | 999 | UGCCACUGUAGAAAGGCAUGAUU | 1000 |
| D-1417 | [INVAB]UCAUGCCUUUCUACAGUGGCA | 1001 | UGCCACUGUAGAAAGGCAUGAUU | 1002 |
| D-1418 | UCAUGCCUUUCUACAGUGGC{INVDA} | 1003 | UGCCACUGUAGAAAGGCAUGAUU | 1004 |
| D-1419 | CUGCUUCAUGCCUUUCUACA{INVAB} | 1005 | AUGUAGAAAGGCAUGAAGCAGUU | 1006 |
| D-1420 | CUGCUUCAUGCCUUUCUACA{INVAB} | 1007 | UUGUAGAAAGGCAUGAAGCAGUU | 1008 |
| D-1421 | CUGCUUCAUGCCUUUCUACA{INVDA} | 1009 | UUGUAGAAAGGCAUGAAGCAGUU | 1010 |
| D-1422 | UCAUGCCUUUCUACAGUGGC{INVAB} | 1011 | UGCCACUGUAGAAAGGCAUGAUU | 1012 |
| D-1423 | UCAUGCCUUUCUACAGUGGC{INVDA} | 1013 | UGCCACUGUAGAAAGGCAUGAUU | 1014 |
| D-1424 | [INVAB]CUUCAUGCCUUUCUACAGUUU | 1015 | ACUGUAGAAAGGCAUGAAGUU | 1016 |
| D-1425 | CUGCUUCAUGCCUUUCUACA{INVAB} | 1017 | AUGUA[AB]AAAGGCAUGAAGCAGUU | 1018 |
| D-1426 | CUGCUUCAUGCCUUUCUACA{INVAB} | 1019 | AUGUA[AB]AAAGGCAUGAAGCAGUU | 1020 |
| D-1427 | UGCUUCAUGCCUUUCUACAG{INVAB} | 1021 | ACUGU[AB]GAAAGGCAUGAAGCAUU | 1022 |
| D-1428 | UGCUUCAUGCCUUUCUACAG{INVAB} | 1023 | ACUGU[AB]GAAAGGCAUGAAGCAUU | 1024 |
| D-1429 | UCAUGCCUUUCUACAGUGGC{INVAB} | 1025 | AGCCA[AB]UGUAGAAAGGCAUGAUU | 1026 |
| D-1430 | UCAUGCCUUUCUACAGUGGC{INVAB} | 1027 | AGCCA[AB]UGUAGAAAGGCAUGAUU | 1028 |
| D-1431 | CUGCUUCAUGCCUUUCUACA{INVAB} | 1029 | AU[GNA-G]UAGAAAGGCAUGAAGCAGUU | 1030 |
| D-1432 | CUGCUUCAUGCCUUUCUACA{INVAB} | 1031 | AUG[GNA-U]AGAAAGGCAUGAAGCAGUU | 1032 |
| D-1433 | CUGCUUCAUGCCUUUCUACA{INVAB} | 1033 | AUGU[GNA-A]GAAAGGCAUGAAGCAGUU | 1034 |
| D-1434 | CUGCUUCAUGCCUUUCUACA{INVAB} | 1035 | AUGUA[GNA-G]AAAGGCAUGAAGCAGUU | 1036 |
| D-1435 | CUGCUUCAUGCCUUUCUACA{INVAB} | 1037 | AUGUAG[GNA-A]AAGGCAUGAAGCAGUU | 1038 |
| D-1436 | CUGCUUCAUGCCUUUCUACA{INVAB} | 1039 | AUGUAGA[GNA-A]AGGCAUGAAGCAGUU | 1040 |
| D-1437 | CUGCUUCAUGCCUUUCUACA{INVAB} | 1041 | AUGUAGAAAGGCAUGAAGCAGUU | 1042 |
| D-1438 | [INVAB]CUGCUUCAUGCCUUUCUACAU | 1043 | AUGUAGAAAGGCAUGAAGCAGUU | 1044 |
| D-1439 | [INVAB]CUGCUUCAUGCCUUUCUACA{INVAB} | 1045 | AUGUAGAAAGGCAUGAAGCAGUU | 1046 |
| D-1440 | CUGCUUCAUGCCUUUCUACA{INVAB} | 1047 | AUGUAGAAAGGCAUGAAGCAGUU | 1048 |
| D-1441 | CUGCUUCAUGCCUUUCUACA{INVAB} | 1049 | AUGUAGAAAGGCAUGAAGCAGUU | 1050 |
| D-1442 | [INVAB]CUGCUUCAUGCCUUUCUACAU | 1051 | AUGUAGAAAGGCAUGAAGCAGUU | 1052 |
| D-1443 | CUGCUUCAUGCCUUUCUACA{INVAB} | 1053 | AUGUAGAAAGGCAUGAAGCAGUU | 1054 |
| D-1444 | CUGCUUCAUGCCUUUCUACA{INVAB} | 1055 | AUGUAGAAAGGCAUGAAGCAGUU | 1056 |
| D-1445 | [INVAB]CUGCUUCAUGCCUUUCUACAU | 1057 | AUGUAGAAAGGCAUGAAGCAGUU | 1058 |
| D-1446 | [INVAB]CUGCUUCAUGCCUUUCUACA{INVAB} | 1059 | AUGUAGAAAGGCAUGAAGCAGUU | 1060 |
| D-1447 | CUGCUUCAUGCCUUUCUACA{INVAB} | 1061 | A[AB]GUAGAAAGGCAUGAAGCAGUU | 1062 |
| D-1448 | CUGCUUCAUGCCUUUCUACA{INVAB} | 1063 | AU[AB]UAGAAAGGCAUGAAGCAGUU | 1064 |
| D-1449 | CUGCUUCAUGCCUUUCUACA{INVAB} | 1065 | AUG[AB]AGAAAGGCAUGAAGCAGUU | 1066 |
| D-1450 | CUGCUUCAUGCCUUUCUACA{INVAB} | 1067 | AUGU[AB]GAAAGGCAUGAAGCAGUU | 1068 |
| D-1451 | CUGCUUCAUGCCUUUCUACA{INVAB} | 1069 | AUGUAG[AB]AAGGCAUGAAGCAGUU | 1070 |
| D-1452 | CUGCUUCAUGCCUUUCUACA{INVAB} | 1071 | AUGUAGA[AB]AGGCAUGAAGCAGUU | 1072 |
| D-1453 | CAACGUACCCUUCAUUGAUG{INVAB} | 1073 | ACAUCAAUGAAGGGUACGUUGUU | 1074 |
| D-1454 | CAACGUACCCUUCAUUGAUG{INVAB} | 1075 | ACAUCAAUGAAGGGUACGUUGUU | 1076 |
| D-1455 | ACAUGGCUUCCAGAUAUGCC{INVAB} | 1077 | AGGCAUAUCUGGAAGCCAUGUUU | 1078 |
| D-1456 | ACAUGGCUUCCAGAUAUGCC{INVAB} | 1079 | AGGCAUAUCUGGAAGCCAUGUUU | 1080 |
| D-1457 | CUGCUUCAUGCCUUUCUACA{INVAB} | 1081 | AUGUAGAAAGGCAUGAAGCAGUU | 1082 |
| D-1458 | CUGCUUCAUGCCUUUCUACA{INVAB} | 1083 | AUGUAGAAAGGCAUGAAGCAGUU | 1084 |
| D-1459 | CUGCUUCAUGCCUUUCUACA{INVAB} | 1085 | AUGUAGAAAGGCAUGAAGCAGUU | 1086 |
| D-1460 | CUGCGGCUUCCUGGGCUUCU{INVAB} | 1087 | UAGAAGCCCAGGAAGCCGCAGUU | 1088 |
| D-1461 | CUGCGGCUUCCUGGGCUUCU{INVAB} | 1089 | UAGAAGCCCAGGAAGCCGCAGUU | 1090 |
| D-1462 | UGCUUCAUGCCUUUCUACAG{INVAB} | 1091 | ACUGUAGAAAGGCAUGAAGCAUU | 1092 |
| D-1463 | [INVAB]UGCUUCAUGCCUUUCUACAGU | 1093 | ACUGUAGAAAGGCAUGAAGCAUU | 1094 |
| D-1464 | [INVAB]UGCUUCAUGCCUUUCUACAG{INVAB} | 1095 | ACUGUAGAAAGGCAUGAAGCAUU | 1096 |
| D-1465 | UGCUUCAUGCCUUUCUACAG{INVAB} | 1097 | ACUGUAGAAAGGCAUGAAGCAUU | 1098 |
| D-1466 | UGCUUCAUGCCUUUCUACAG{INVAB} | 1099 | ACUGUAGAAAGGCAUGAAGCAUU | 1100 |
| D-1467 | UGCUUCAUGCCUUUCUACAG{INVAB} | 1101 | ACUGUAGAAAGGCAUGAAGCAUU | 1102 |
| D-1468 | CUGCUUCAUGCCUUUCUACAU | 1103 | AUGUAGAAAGGCAUGAAGCAGUU | 1104 |
| D-1469 | CUGCUUCAUGCCUUUCUACAU | 1105 | AUGUAGAAAGGCAUGAAGCAGUU | 1106 |
| D-1470 | CUGCUUCAUGCCUUUCUACAU | 1107 | AUGUAGAAAGGCAUGAAGCAGUU | 1108 |
| D-1471 | UGCUUCAUGCCUUUCUACAG{INVAB} | 1109 | UCUGUAGAAAGGCAUGAAGCAUU | 1110 |
| D-1472 | UGCUUCAUGCCUUUCUACAG{INVDA} | 1111 | UCUGUAGAAAGGCAUGAAGCAUU | 1112 |
| D-1473 | CUGCUUCAUGCCUUUCUACA{INVDT} | 1113 | AUGUAGAAAGGCAUGAAGCAGUU | 1114 |
| D-1474 | CUGCUUCAUGCCUUUCUACA{INVAB} | 1115 | AUGUAGA[GNA-A]AGGCAUGAAGCAGUU | 1116 |
| D-1475 | CUGCUUCAUGCCUUUCUACA{INVAB} | 1117 | AUGUAGA[GNA-A]AGGCAUGAAGCAGUU | 1118 |
| D-1476 | CUGCUUCAUGCCUUUCUACA{INVAB} | 1119 | AUGUAGA[GNA-A]AGGCAUGAAGCAGUU | 1120 |
| D-1477 | CUGCUUCAUGCCUUUCUACA{INVAB} | 1121 | AUGUAGA[GNA-A]AGGCAUGAAGCAGUU | 1122 |
| D-1478 | CUGCUUCAUGCCUUUCUACA{INVAB} | 1123 | AUGUAGA[GNA-A]AGGCAUGAAGCAGUU | 1124 |
| D-1479 | CUGCUUCAUGCCUUUCUACA{INVAB} | 1125 | AUGUAGA[GNA-A]AGGCAUGAAGCAGUU | 1126 |
| D-1480 | CUGCUUCAUGCCUUUCUACA{INVAB} | 1127 | AUGUAGA[GNA-A]AGGCAUGAAGCAGUU | 1128 |
| D-1481 | CUGCUUCAUGCCUUUCUACA{INVAB} | 1129 | AUGUAGA[GNA-A]AGGCAUGAAGCAGUU | 1130 |
| D-1482 | CUGCUUCAUGCCUUUCUACA{INVAB} | 1131 | AUGUAGA[GNA-A]AGGCAUGAAGCAGUU | 1132 |
| D-1483 | CUGCUUCAUGCCUUUCUACA{INVAB} | 1133 | AUGUAGA[GNA-A]AGGCAUGAAGCAGUU | 1134 |
| D-1484 | CUGCUUCAUGCCUUUCUACA{INVAB} | 1135 | AUGUAGA[GNA-A]AGGCAUGAAGCAGUU | 1136 |
| D-1485 | CUGCUUCAUGCCUUUCUACA{INVAB} | 1137 | AUGUAGA[GNA-A]AGGCAUGAAGCAGUU | 1138 |
| D-1486 | CUGCUUCAUGCCUUUCUACA{INVAB} | 1139 | AUGUAGA[GNA-A]AGGCAUGAAGCAGUU | 1140 |
| D-1487 | CUGCUUCAUGCCUUUCUACA{INVAB} | 1141 | AUGUAGA[GNA-A]AGGCAUGAAGCAGUU | 1142 |
| D-1488 | CUGCUUCAUGCCUUUCUACA{INVAB} | 1143 | AUGUAGA[GNA-A]AGGCAUGAAGCAGUU | 1144 |
| D-1489 | CUGCUUCAUGCCUUUCUACA{INVAB} | 1145 | AUGUAGA[GNA-A]AGGCAUGAAGCAGUU | 1146 |
| D-1490 | CUGCUUCAUGCCUUUCUACA{INVAB} | 1147 | AUGUAGA[GNA-A]AGGCAUGAAGCAGUU | 1148 |
| D-1491 | CUGCUUCAUGCCUUUCUACA{INVAB} | 1149 | AUGUAGA[GNA-A]A[DG]GCAUGAAGCAGUU | 1150 |
| D-1492 | CUGCUUCAUGCCUUUCUACA{INVAB} | 1151 | AUGUAGA[GNA-A][DA]GGCAUGAAGCAGUU | 1152 |
| D-1493 | CUGCUUCAUGCCUUUCUACA{INVAB} | 1153 | AUGUAGA[GNA-A]AG[DG]CAUGAAGCAGUU | 1154 |
| D-1494 | CUGCUUCAUGCCUUUCUACA{INVAB} | 1155 | AUGUAGA[GNA-A]AGGCAUGAAGCAGUU | 1156 |
| D-1495 | CUGCUUCAUGCCUUUCUACA{INVAB} | 1157 | AUGUAGA[GNA-A]AGGCAUGAAGCAGUU | 1158 |
| D-1496 | CUGCUUCAUGCCUUUCUACA{INVAB} | 1159 | AUGUAGA[GNA-A]AGGCAUGAAGCAGUU | 1160 |
| D-1497 | CUGCUUCAUGCCUUUCUACA{INVAB} | 1161 | AUGUAGA[GNA-A]AGGCAUGAAGCAGUU | 1162 |
| D-1498 | CUGCUUCAUGCCUUUCUACA{INVAB} | 1163 | AUGUAGA[GNA-A]AGGCAUGAAGCAGUU | 1164 |
| D-1499 | CUGCUUCAUGCCUUUCUACA{INVAB} | 1165 | AUGUAGA[GNA-A]AGGCAUGAAGCAGUU | 1166 |
| D-1500 | CUGCUUCAUGCCUUUCUACA{INVAB} | 1167 | AUGUAGAAAGGCAUGAAGCAGUU | 1168 |
| D-1501 | UGCUUCAUGCCUUUCUACAG{INVDA} | 1169 | U[GNA-C]UGUAGAAAGGCAUGAAGCAUU | 1170 |
| D-1502 | UGCUUCAUGCCUUUCUACAG{INVDA} | 1171 | UC[GNA-U]GUAGAAAGGCAUGAAGCAUU | 1172 |
| D-1503 | UGCUUCAUGCCUUUCUACAG{INVDA} | 1173 | UCUG[GNA-U]AGAAAGGCAUGAAGCAUU | 1174 |
| D-1504 | UGCUUCAUGCCUUUCUACAG{INVDA} | 1175 | UCUGU[GNA-A]GAAAGGCAUGAAGCAUU | 1176 |
| D-1505 | UGCUUCAUGCCUUUCUACAG{INVDA} | 1177 | UCUGUAG[GNA-A]AAGGCAUGAAGCAUU | 1178 |
| D-1506 | UGCUUCAUGCCUUUCUACAG{INVDA} | 1179 | U[AB]UGUAGAAAGGCAUGAAGCAUU | 1180 |
| D-1507 | UGCUUCAUGCCUUUCUACAG{INVDA} | 1181 | UC[AB]GUAGAAAGGCAUGAAGCAUU | 1182 |
| D-1508 | UGCUUCAUGCCUUUCUACAG{INVDA} | 1183 | UCU[AB]UAGAAAGGCAUGAAGCAUU | 1184 |
| D-1509 | UGCUUCAUGCCUUUCUACAG{INVDA} | 1185 | UCUG[AB]AGAAAGGCAUGAAGCAUU | 1186 |
| D-1510 | UGCUUCAUGCCUUUCUACAG{INVDA} | 1187 | UCUGU[AB]GAAAGGCAUGAAGCAUU | 1188 |
| D-1511 | UGCUUCAUGCCUUUCUACAG{INVDA} | 1189 | UCUGUA[AB]AAAGGCAUGAAGCAUU | 1190 |
| D-1512 | UGCUUCAUGCCUUUCUACAG{INVDA} | 1191 | UCUGUAG[AB]AAGGCAUGAAGCAUU | 1192 |
| D-1513 | UCAUGCCUUUCUACAGUGGC{INVDT} | 1193 | AGCCACUGUAGAAAGGCAUGAUU | 1194 |
| D-1514 | UCAUGCCUUUCUACAGUGGC{INVAB} | 1195 | UGCCACUGUAGAAAGGCAUGAUU | 1196 |
| D-1515 | UCAUGCCUUUCUACAGUGGC{INVDA} | 1197 | UGCCACUGUAGAAAGGCAUGAUU | 1198 |
| D-1516 | UCCUGCUUCAUGCCUUUCUA{INVDT} | 1199 | AUAGAAAGGCAUGAAGCAGGAUU | 1200 |
| D-1517 | UCCUGCUUCAUGCCUUUCUA{INVAB} | 1201 | UUAGAAAGGCAUGAAGCAGGAUU | 1202 |
| D-1518 | UCCUGCUUCAUGCCUUUCUA{INVDA} | 1203 | UUAGAAAGGCAUGAAGCAGGAUU | 1204 |
| D-1519 | UAUGUUCCUGCUUCAUGCCU{INVDT} | 1205 | AAGGCAUGAAGCAGGAACAUAUU | 1206 |
| D-1520 | UAUGUUCCUGCUUCAUGCCU{INVAB} | 1207 | UAGGCAUGAAGCAGGAACAUAUU | 1208 |
| D-1521 | UAUGUUCCUGCUUCAUGCCU{INVDA} | 1209 | UAGGCAUGAAGCAGGAACAUAUU | 1210 |
| D-1522 | UCCUGCUUCAUGCCUUUCUA{INVAB} | 1211 | AUAGAAAGGCAUGAAGCAGGAUU | 1212 |
| D-1523 | UAUGUUCCUGCUUCAUGCCU{INVAB} | 1213 | AAGGCAUGAAGCAGGAACAUAUU | 1214 |
| D-1524 | UCAUGCCUUUCUACAGUGGC{INVDT} | 1215 | AGCCACUGUAGAAAGGCAUGAUU | 1216 |
| D-1525 | UCCUGCUUCAUGCCUUUCUA{INVDT} | 1217 | AUAGAAAGGCAUGAAGCAGGAUU | 1218 |
| D-1526 | UCCUGCUUCAUGCCUUUCUA{INVDA} | 1219 | UUAGAAAGGCAUGAAGCAGGAUU | 1220 |
| D-1527 | UAUGUUCCUGCUUCAUGCCU{INVDA} | 1221 | UAGGCAUGAAGCAGGAACAUAUU | 1222 |
| D-1528 | UGCUUCAUGCCUUUCUACAG{INVDA} | 1223 | UCUGUA[GNA-G]AAAGGCAUGAAGCAUU | 1224 |
| D-1529 | CUGCUUCAUGCCUUUCUACA{INVAB} | 1225 | AUGUAGA[GNA-A]AGGCAUGAAGCAGUU | 1226 |
| D-1530 | CUGCUUCAUGCCUUUCUACA{INVAB} | 1227 | AUGUAGA[GNA-A]AGGCAUGAAGCAGUU | 1228 |
| D-1531 | CUGCUUCAUGCCUUUCUACA{INVAB} | 1229 | AUGUAGA[GNA-A]AGGCAUGAAGCAGUU | 1230 |
| D-1532 | CUGCUUCAUGCCUUUCUACA{INVAB} | 1231 | AUGUAGA[GNA-A]AGGCAUGAAGCAGUU | 1232 |
| D-1533 | CUGCUUCAUGCCUUUCUACA{INVAB} | 1233 | AUGUAGA[GNA-A]AGGCAUGAAGCAGUU | 1234 |
| D-1534 | CUGCUUCAUGCCUUUCUACA{INVAB} | 1235 | AUGUAGA[GNA-A]AGGCAUGAAGCAGUU | 1236 |
| D-1535 | CUGCUUCAUGCCUUUCUACA{INVAB} | 1237 | AUGUAGA[GNA-A]AGGCAUGAAGCAGUU | 1238 |
| D-1536 | CUGCUUCAUGCCUUUCUACA{INVAB} | 1239 | AUGUAGA[GNA-A]AGGCAUGAAGCAGUU | 1240 |
| D-1537 | CUGCUUCAUGCCUUUCUACA{INVAB} | 1241 | AUGUAGA[GNA-A]AGGCAUGAAGCAGUU | 1242 |
| D-1538 | CUGCUUCAUGCCU[LNA- | 1243 | AUGUAGA[GNA-A]AGGCAUGAAGCAGUU | 1244 |
| | T]UCUACA{INVAB} | | | |
| D-1539 | CUGCUUCAUGCC[LNA- | 1245 | AUGUAGA[GNA-A]AGGCAUGAAGCAGUU | 1246 |
| | T]UUCUACA{INVAB} | | | |
| D-1540 | CUGCUUCAUGCCUU[LNA- | 1247 | AUGUAGA[GNA-A]AGGCAUGAAGCAGUU | 1248 |
| | T]CUACA{INVAB} | | | |
| D-1541 | CUGCUUCAUGCCUUUC[LNA- | 1249 | AUGU[GNA-A]GAAAGGCAUGAAGCAGUU | 1250 |
| | T]ACA{INVAB} | | | |
| D-1542 | CUGCUUCAUGCCUUUCU[LNA- | 1251 | AUG[GNA-U]AGAAAGGCAUGAAGCAGUU | 1252 |
| | A]CA{INVAB} | | | |
| D-1543 | CUGCUUCAUGCCUUUCUAC[LNA- | 1253 | A[GNA-U]GUAGAAAGGCAUGAAGCAGUU | 1254 |
| | A]{INVAB} | | | |
| D-1544 | CUGCUUCAUGCCUU[LNA- | 1255 | AUGUAG[AB]AAGGCAUGAAGCAGUU | 1256 |
| | T]CUACA{INVAB} | | | |
| D-1545 | CUGCUUCAUGCCUUUC[LNA- | 1257 | AUGU[B]GAAAGGCAUGAAGCAGUU | 1258 |
| | T]ACA{INVAB} | | | |
| D-1546 | CUGCUUCAUGCCUUUCU[LNA- | 1259 | AUG[AB]AGAAAGGCAUGAAGCAGUU | 1260 |
| | A]CA{INVAB} | | | |
| D-1547 | CUGCUUCAUGCCUUUCUACA{INVAB} | 1261 | AUGUAGA[GNA-A]AGGCAUGAAGCAGUU | 1262 |
| D-1548 | CUGCUUCAUGCCUUUCUACA{INVAB} | 1263 | AUGUAGA[GNA-A]AGGCAUGAAGCAGUU | 1264 |
| D-1549 | CUGCUUCAUGCCU[LNA- | 1265 | AUGUAGA[GNA-A]AGGCAUGAAGCAGUU | 1266 |
| | T]UCUACA{INVAB} | | | |
| D-1550 | CUGCUUCAUGCCU[LNA- | 1267 | AUGUAGA[GNA-A]AGGCAUGAAGCAGUU | 1268 |
| | T]UCUACA{INVAB} | | | |
| D-1551 | CUGCUUCAUGCCU[LNA- | 1269 | AUGUAGA[GNA-A]AGGCAUGAAGCAGUU | 1270 |
| | T]UCUACA{INVAB} | | | |
| D-1552 | CUGCUUCAUGCCU[LNA- | 1271 | AUGUAGA[GNA-A]AGGCAUGAAGCAGUU | 1272 |
| | T]UCUACA{INVAB} | | | |
| D-1553 | UGCUUCAUGCCUUUCU[LNA- | 1273 | UCUG[AB]AGAAAGGCAUGAAGCAUU | 1274 |
| | A]CAG{INVDA} | | | |
| D-1554 | UGCUUCAUGCCUUUC[LNA- | 1275 | UCUGU[AB]GAAAGGCAUGAAGCAUU | 1276 |
| | T]ACAG{INVDA} | | | |
| D-1555 | UGCUUCAUGCCUU[LNA- | 1277 | UCUGUAG[AB]AAGGCAUGAAGCAUU | 1278 |
| | T]CUACAG{INVDA} | | | |
| D-1556 | UGCUUCAUGCCUUUCUAC[LNA- | 1279 | UC[GNA-U]GUAGAAAGGCAUGAAGCAUU | 1280 |
| | A]G{INVDA} | | | |
| D-1557 | UGCUUCAUGCCUUUCU[LNA- | 1281 | UCUG[GNA-U]AGAAAGGCAUGAAGCAUU | 1282 |
| | A]CAG{INVDA} | | | |
| D-1558 | UGCUUCAUGCCUUUC[LNA- | 1283 | UCUGU[GNA-A]GAAAGGCAUGAAGCAUU | 1284 |
| | T]ACAG{INVDA} | | | |
| D-1559 | UGCUUCAUGCCUUUCUACA[LNA- | 1285 | U[AB]UGUAGAAAGGCAUGAAGCAUU | 1286 |
| | G]{INVDA} | | | |
| D-1560 | UGCUUCAUGCCUUUCUAC[LNA- | 1287 | UC[AB]GUAGAAAGGCAUGAAGCAUU | 1288 |
| | A]G{INVDA} | | | |
| D-1561 | UCAUGCCUUUCUACA[LNA- | 1289 | AGCCA[AB]UGUAGAAAGGCAUGAUU | 1290 |
| | G]UGGC{INVAB} | | | |
| D-1562 | UCAUGCCUUUCUACAG[LNA- | 1291 | AGCCA[AB]UGUAGAAAGGCAUGAUU | 1292 |
| | T]GGC{INVAB} | | | |
| D-1563 | UCAUGCCUUUCUACAGUGGC{INVAB} | 1293 | AGCCA[AB]UGUAGAAAGGCAUGAUU | 1294 |
| D-1564 | GGUAUGUUCCUGCUUCAUUUU | 2257 | AAUGAAGCAGGAACAUACCUU | 2258 |
| D-1565 | GGUAUGUUCCUGCUUCAUAUU | 2259 | UAUGAAGCAGGAACAUACCUU | 2260 |
| D-1566 | GUAUGUUCCUGCUUCAUGUUU | 2261 | ACAUGAAGCAGGAACAUACUU | 2262 |
| D-1567 | UAUGUUCCUGCUUCAUGCAUU | 2263 | UGCAUGAAGCAGGAACAUAUU | 2264 |
| D-1568 | AUGUUCCUGCUUCAUGCCUUU | 2265 | AGGCAUGAAGCAGGAACAUUU | 2266 |
| D-1569 | UGUUCCUGCUUCAUGCCUUUU | 2267 | AAGGCAUGAAGCAGGAACAUU | 2268 |
| D-1570 | GUUCCUGCUUCAUGCCUUUUU | 2269 | AAAGGCAUGAAGCAGGAACUU | 2270 |
| D-1571 | UUCCUGCUUCAUGCCUUUUUU | 2271 | AAAAGGCAUGAAGCAGGAAUU | 2272 |
| D-1572 | UUCCUGCUUCAUGCCUUUAUU | 2273 | UAAAGGCAUGAAGCAGGAAUU | 2274 |
| D-1573 | UCCUGCUUCAUGCCUUUCUUU | 2275 | AGAAAGGCAUGAAGCAGGAUU | 2276 |
| D-1574 | CCUGCUUCAUGCCUUUCUAUU | 2277 | UAGAAAGGCAUGAAGCAGGUU | 2278 |
| D-1575 | CUGCUUCAUGCCUUUCUAUUU | 2279 | AUAGAAAGGCAUGAAGCAGUU | 2280 |
| D-1576 | CUGCUUCAUGCCUUUCUAAUU | 2281 | UUAGAAAGGCAUGAAGCAGUU | 2282 |
| D-1577 | UGCUUCAUGCCUUUCUACAUU | 2283 | UGUAGAAAGGCAUGAAGCAUU | 2284 |
| D-1578 | GCUUCAUGCCUUUCUACAUUU | 2285 | AUGUAGAAAGGCAUGAAGCUU | 2286 |
| D-1579 | GCUUCAUGCCUUUCUACAAUU | 2287 | UUGUAGAAAGGCAUGAAGCUU | 2288 |
| D-1580 | CUUCAUGCCUUUCUACAGUUU | 2289 | ACUGUAGAAAGGCAUGAAGUU | 2290 |
| D-1581 | UUCAUGCCUUUCUACAGUUUU | 2291 | AACUGUAGAAAGGCAUGAAUU | 2292 |
| D-1582 | UUCAUGCCUUUCUACAGUAUU | 2293 | UACUGUAGAAAGGCAUGAAUU | 2294 |
| D-1583 | UCAUGCCUUUCUACAGUGUUU | 2295 | ACACUGUAGAAAGGCAUGAUU | 2296 |
| D-1584 | UCAUGCCUUUCUACAGUGAUU | 2297 | UCACUGUAGAAAGGCAUGAUU | 2298 |
| D-1585 | CAUGCCUUUCUACAGUGGUUU | 2299 | ACCACUGUAGAAAGGCAUGUU | 2300 |
| D-1586 | CAUGCCUUUCUACAGUGGAUU | 2301 | UCCACUGUAGAAAGGCAUGUU | 2302 |
| D-1587 | AUGCCUUUCUACAGUGGCUUU | 2303 | AGCCACUGUAGAAAGGCAUUU | 2304 |
| D-1588 | AUGCCUUUCUACAGUGGCAUU | 2305 | UGCCACUGUAGAAAGGCAUUU | 2306 |
| D-1589 | UGCCUUUCUACAGUGGCCUUU | 2307 | AGGCCACUGUAGAAAGGCAUU | 2308 |
| D-1590 | GCCUUUCUACAGUGGCCUUUU | 2309 | AAGGCCACUGUAGAAAGGCUU | 2310 |
| D-1591 | GGUAUGUUCCUGCUUCAUCUU | 2311 | GAUGAAGCAGGAACAUACCUU | 2312 |
| D-1592 | GUAUGUUCCUGCUUCAUCCUU | 2313 | GGAUGAAGCAGGAACAUACUU | 2314 |
| D-1593 | UAUGUUCCUGCUUCAUCCCUU | 2315 | GGGAUGAAGCAGGAACAUAUU | 2316 |
| D-1594 | AUGUUCCUGCUUCAUCCCCUU | 2317 | GGGGAUGAAGCAGGAACAUUU | 2318 |
| D-1595 | UGUUCCUGCUUCAUCCCCUUU | 2319 | AGGGGAUGAAGCAGGAACAUU | 2320 |
| D-1596 | GUUCCUGCUUCAUCCCCUUUU | 2321 | AAGGGGAUGAAGCAGGAACUU | 2322 |
| D-1597 | UUCCUGCUUCAUCCCCUUCUU | 2323 | GAAGGGGAUGAAGCAGGAAUU | 2324 |
| D-1598 | UCCUGCUUCAUCCCCUUCUUU | 2325 | AGAAGGGGAUGAAGCAGGAUU | 2326 |
| D-1599 | CCUGCUUCAUCCCCUUCUAUU | 2327 | UAGAAGGGGAUGAAGCAGGUU | 2328 |
| D-1600 | CUGCUUCAUCCCCUUCUACUU | 2329 | GUAGAAGGGGAUGAAGCAGUU | 2330 |
| D-1601 | UGCUUCAUCCCCUUCUACAUU | 2331 | UGUAGAAGGGGAUGAAGCAUU | 2332 |
| D-1602 | GCUUCAUCCCCUUCUACAGUU | 2333 | CUGUAGAAGGGGAUGAAGCUU | 2334 |
| D-1603 | CUUCAUCCCCUUCUACAGUUU | 2335 | ACUGUAGAAGGGGAUGAAGUU | 2336 |
| D-1604 | UUCAUCCCCUUCUACAGUGUU | 2337 | CACUGUAGAAGGGGAUGAAUU | 2338 |
| D-1605 | UCAUCCCCUUCUACAGUGGUU | 2339 | CCACUGUAGAAGGGGAUGAUU | 2340 |
| D-1606 | CAUCCCCUUCUACAGUGGCUU | 2341 | GCCACUGUAGAAGGGGAUGUU | 2342 |
| D-1607 | AUCCCCUUCUACAGUGGCCUU | 2343 | GGCCACUGUAGAAGGGGAUUU | 2344 |
| D-1608 | UCCCCUUCUACAGUGGCCUUU | 2345 | AGGCCACUGUAGAAGGGGAUU | 2346 |
| D-1609 | CCCCUUCUACAGUGGCCUUUU | 2347 | AAGGCCACUGUAGAAGGGGUU | 2348 |

[0180] To improve the potency and in vivo stability of PNPLA3 siRNA sequences, chemical modifications were incorporated into PNPLA3 siRNA molecules. Specifically, 2′-O-methyl and 2′-fluoro modifications of the ribose sugar were incorporated at specific positions within the PNPLA3 siRNAs. Phosphorothioate internucleotide linkages were also incorporated at the terminal ends of the antisense and/or sense sequences. Table 2 below depicts the modifications in the sense and antisense sequences for each of the modified PNPLA3 siRNAs. The nucleotide sequences in Table X are listed according to the following notations: A, U, G, and C=corresponding ribonucleotide; dT=deoxythymidine; a, u, g, and c=corresponding 2′-O-methyl ribonucleotide; Af, Uf, Gf, and Cf=corresponding 2′-deoxy-2′-fluoro (“2′-fluoro”) ribonucleotide. Insertion of an “s” in the sequence indicates that the two adjacent nucleotides are connected by a phosphorothiodiester group (e.g. a phosphorothioate internucleotide linkage). Unless indicated otherwise, all other nucleotides are connected by 3′-5′ phosphodiester groups. Each of the siRNA compounds in Table 2 comprises a 19 base pair duplex region with either a 2 nucleotide overhang at the 3′ end of both strands or bluntmer at one or both ends. The GalNAc3K2AhxC6 is:

[chemical structure]

TABLE 2
siRNA sequences directed to PNPLA3 with modifications

| | | SEQ ID | | SEQ ID |
|---|---|---|---|---|
| Duplex | | NO: | | NO: |
| No. | Sense sequence (5′-3′) | (sense) | Antisense sequence (5′-3′) | (antisense) |
| D-2000 | GfsgsGfcAfaUfaAfAfGfuAfcCfuGfcUf | 167 | asGfscAfgGfuAfcuuUfaUfuGfcCfcsUfs | 168 |
| | susUf | | u | |
| D-2001 | CfsgsGfcCfaAfuGfUfCfcAfcCfaGfcUf | 169 | asGfscUfgGfuGfgacAfuUfgGfcCfgsUfs | 170 |
| | susUf | | u | |
| D-2002 | GfsgsUfcCfaGfcCfUfGfaAfcUfuCfuUf | 171 | asAfsgAfaGfuUfcagGfcUfgGfaCfcsUfs | 172 |
| | susUf | | u | |
| D-2003 | GfscsUfuCfaUfcCfCfCfuUfcUfaCfaGf | 173 | csUfsgUfaGfaAfgggGfaUfgAfaGfcsUfs | 174 |
| | susUf | | u | |
| D-2004 | GfscsGfgCfuUfcCfUfGfgGfcUfuCfuAf | 175 | usAfsgAfaGfcCfcagGfaAfgCfcGfcsUfs | 176 |
| | susUf | | u | |
| D-2005 | GfscsCfuCfuGfaGfCfUfgAfgUfuGfgUf | 177 | asCfscAfaCfuCfagcUfcAfgAfgGfcsUfs | 178 |
| | susUf | | u | |
| D-2006 | GfsusGfaCfaAfcGfUfAfcCfcUfuCfaUf | 179 | asUfsgAfaGfgGfuacGfuUfgUfcAfcsUfs | 180 |
| | susUf | | u | |
| D-2007 | CfscsCfgCfcUfcCfAfGfgUfcCfcAfaAf | 181 | usUfsuGfgGfaCfcugGfaGfgCfgGfgsUfs | 182 |
| | susUf | | u | |
| D-2008 | CfsusUfcAfuCfcCfCfUfuCfuAfcAfgUf | 183 | asCfsuGfuAfgAfaggGfgAfuGfaAfgsUfs | 184 |
| | susUf | | u | |
| D-2009 | GfsgsUfaUfgUfuCfCfUfgCfuUfcAfuGf | 185 | csAfsuGfaAfgCfaggAfaCfaUfaCfcsUfs | 186 |
| | susUf | | u | |
| D-2010 | GfsusAfuGfuUfcCfUfGfcUfuCfaUfgCf | 187 | gsCfsaUfgAfaGfcagGfaAfcAfuAfcsUfs | 188 |
| | susUf | | u | |
| D-2011 | UfsasUfgUfuCfcUfGfCfuUfcAfuGfcCf | 189 | gsGfscAfuGfaAfgcaGfgAfaCfaUfasUfs | 190 |
| | susUf | | u | |
| D-2012 | AfsusGfuUfcCfuGfCfUfuCfaUfgCfcCf | 191 | gsGfsgCfaUfgAfagcAfgGfaAfcAfusUfs | 192 |
| | susUf | | u | |
| D-2013 | UfsgsUfuCfcUfgCfUfUfcAfuGfcCfcUf | 193 | asGfsgGfcAfuGfaagCfaGfgAfaCfasUfs | 194 |
| | susUf | | u | |
| D-2014 | GfsusUfcCfuGfcUfUfCfaUfgCfcCfuUf | 195 | asAfsgGfgCfaUfgaaGfcAfgGfaAfcsUfs | 196 |
| | susUf | | u | |
| D-2015 | UfsusCfcUfgCfuUfCfAfuGfcCfcUfuCf | 197 | gsAfsaGfgGfcAfugaAfgCfaGfgAfasUfs | 198 |
| | susUf | | u | |
| D-2016 | UfscsCfuGfcUfuCfAfUfgCfcCfuUfcUf | 199 | asGfsaAfgGfgCfaugAfaGfcAfgGfasUfs | 200 |
| | susUf | | u | |
| D-2017 | CfscsUfgCfuUfcAfUfGfcCfcUfuCfuAf | 201 | usAfsgAfaGfgGfcauGfaAfgCfaGfgsUfs | 202 |
| | susUf | | u | |
| D-2018 | CfsusGfcUfuCfaUfGfCfcCfuUfcUfaCf | 203 | gsUfsaGfaAfgGfgcaUfgAfaGfcAfgsUfs | 204 |
| | susUf | | u | |
| D-2019 | UfsgsCfuUfcAfuGfCfCfcUfuCfuAfcAf | 205 | usGfsuAfgAfaGfggcAfuGfaAfgCfasUfs | 206 |
| | susUf | | u | |
| D-2020 | GfscsUfuCfaUfgCfCfCfuUfcUfaCfaGf | 207 | csUfsgUfaGfaAfgggCfaUfgAfaGfcsUfs | 208 |
| | susUf | | u | |
| D-2021 | CfsusUfcAfuGfcCfCfUfuCfuAfcAfgUf | 209 | asCfsuGfuAfgAfaggGfcAfuGfaAfgsUfs | 210 |
| | susUf | | u | |
| D-2022 | UfsusCfaUfgCfcCfUfUfcUfaCfaGfuGf | 211 | csAfscUfgUfaGfaagGfgCfaUfgAfasUfs | 212 |
| | susUf | | u | |
| D-2023 | UfscsAfuGfcCfcUfUfCfuAfcAfgUfgGf | 213 | csCfsaCfuGfuAfgaaGfgGfcAfuGfasUfs | 214 |
| | susUf | | u | |
| D-2024 | CfsasUfgCfcCfuUfCfUfaCfaGfuGfgCf | 215 | gsCfscAfcUfgUfagaAfgGfgCfaUfgsUfs | 216 |
| | susUf | | u | |
| D-2025 | AfsusGfcCfcUfuCfUfAfcAfgUfgGfcCf | 217 | gsGfscCfaCfuGfuagAfaGfgGfcAfusUfs | 218 |
| | susUf | | u | |
| D-2026 | UfsgsCfcCfuUfcUfAfCfaGfuGfgCfcUf | 219 | asGfsgCfcAfcUfguaGfaAfgGfgCfasUfs | 220 |
| | susUf | | u | |
| D-2027 | GfscsCfcUfuCfuAfCfAfgUfgGfcCfuUf | 221 | asAfsgGfcCfaCfuguAfgAfaGfgGfcsUfs | 222 |
| | susUf | | u | |
| D-2028 | GfsgsUfaUfgUfuCfCfUfgCfuUfcAfuCf | 223 | gsAfsuGfaAfgCfaggAfaCfaUfaCfcsUfs | 224 |
| | susUf | | u | |
| D-2029 | GfsusAfuGfuUfcCfUfGfcUfuCfaUfcCf | 225 | gsGfsaUfgAfaGfcagGfaAfcAfuAfcsUfs | 226 |
| | susUf | | u | |
| D-2030 | UfsasUfgUfuCfcUfGfCfuUfcAfuCfcCf | 227 | gsGfsgAfuGfaAfgcaGfgAfaCfaUfasUfs | 228 |
| | susUf | | u | |
| D-2031 | AfsusGfuUfcCfuGfCfUfuCfaUfcCfcCf | 229 | gsGfsgGfaUfgAfagcAfgGfaAfcAfusUfs | 230 |
| | susUf | | u | |
| D-2032 | UfsgsUfuCfcUfgCfUfUfcAfuCfcCfcUf | 231 | asGfsgGfgAfuGfaagCfaGfgAfaCfasUfs | 232 |
| | susUf | | u | |
| D-2033 | GfsusUfcCfuGfcUfUfCfaUfcCfcCfuUf | 233 | asAfsgGfgGfaUfgaaGfcAfgGfaAfcsUfs | 234 |
| | susUf | | u | |
| D-2034 | UfsusCfcUfgCfuUfCfAfuCfcCfcUfuCf | 235 | gsAfsaGfgGfgAfugaAfgCfaGfgAfasUfs | 236 |
| | susUf | | u | |
| D-2035 | UfscsCfuGfcUfuCfAfUfcCfcCfuUfcUf | 237 | asGfsaAfgGfgGfaugAfaGfcAfgGfasUfs | 238 |
| | susUf | | u | |
| D-2036 | CfscsUfgCfuUfcAfUfCfcCfcUfuCfuAf | 239 | usAfsgAfaGfgGfgauGfaAfgCfaGfgsUfs | 240 |
| | susUf | | u | |
| D-2037 | CfsusGfcUfuCfaUfCfCfcCfuUfcUfaCf | 241 | gsUfsaGfaAfgGfggaUfgAfaGfcAfgsUfs | 242 |
| | susUf | | u | |
| D-2038 | UfsgsCfuUfcAfuCfCfCfcUfuCfuAfcAf | 243 | usGfsuAfgAfaGfgggAfuGfaAfgCfasUfs | 244 |
| | susUf | | u | |
| D-2039 | UfsusCfaUfcCfcCfUfUfcUfaCfaGfuGf | 245 | csAfscUfgUfaGfaagGfgGfaUfgAfasUfs | 246 |
| | susUf | | u | |
| D-2040 | UfscsAfuCfcCfcUfUfCfuAfcAfgUfgGf | 247 | csCfsaCfuGfuAfgaaGfgGfgAfuGfasUfs | 248 |
| | susUf | | u | |
| D-2041 | CfsasUfcCfcCfuUfCfUfaCfaGfuGfgCf | 249 | gsCfscAfcUfgUfagaAfgGfgGfaUfgsUfs | 250 |
| | susUf | | u | |
| D-2042 | UfscsCfcCfuUfcUfAfCfaGfuGfgCfcUf | 251 | asGfsgCfcAfcUfguaGfaAfgGfgGfasUfs | 252 |
| | susUf | | u | |
| D-2043 | GfsasUfcAfgGfaCfCfCfgAfgCfcGfaUf | 253 | asUfscGfgCfuCfgggUfcCfuGfaUfcsUfs | 254 |
| | susUf | | u | |
| D-2044 | UfsgsGfgCfuUfcUfAfCfcAfcGfuCfgUf | 255 | asCfsgAfcGfuGfguaGfaAfgCfcCfasUfs | 256 |
| | susUf | | u | |
| D-2045 | GfsasGfcGfaGfcAfCfGfcCfcCfgCfaUf | 257 | asUfsgCfgGfgGfcguGfcUfcGfcUfcsUfs | 258 |
| | susUf | | u | |
| D-2046 | UfsgsCfaCfuGfcGfUfCfgGfcGfuCfcUf | 259 | asGfsgAfcGfcCfgacGfcAfgUfgCfasUfs | 260 |
| | susUf | | u | |
| D-2047 | UfsgsGfaGfcAfgAfCfUfcUfgCfaGfgUf | 261 | asCfscUfgCfaGfaguCfuGfcUfcCfasUfs | 262 |
| | susUf | | | |
| D-2048 | UfsgsCfaGfgUfcCfUfCfuCfaGfaUfcUf | 263 | asGfsaUfcUfgAfgagGfaCfcUfgCfasUfs | 264 |
| | susUf | | u | |
| D-2049 | CfscsCfgGfcCfaAfUfGfuCfcAfcCfaUf | 265 | asUfsgGfuGfgAfcauUfgGfcCfgGfgsUfs | 266 |
| | susUf | | u | |
| D-2050 | UfsusCfuAfcAfgUfGfGfcCfuUfaUfcUf | 267 | asGfsaUfaAfgGfccaCfuGfuAfgAfasUfs | 268 |
| | susUf | | u | |
| D-2051 | UfscsUfaCfaGfuGfGfCfcUfuAfuCfcUf | 269 | asGfsgAfuAfaGfgccAfcUfgUfaGfasUfs | 270 |
| | susUf | | u | |
| D-2052 | CfsusUfcCfuUfcAfGfAfgGfcGfuGfcUf | 271 | asGfscAfcGfcCfucuGfaAfgGfaAfgsUfs | 272 |
| | susUf | | u | |
| D-2053 | UfsusCfcUfuCfaGfAfGfgCfgUfgCfgAf | 273 | usCfsgCfaCfgCfcucUfgAfaGfgAfasUfs | 274 |
| | susUf | | u | |
| D-2054 | GfscsGfuGfcGfaUfAfUfgUfgGfaUfgUf | 275 | asCfsaUfcCfaCfauaUfcGfcAfcGfcsUfs | 276 |
| | susUf | | u | |
| D-2055 | CfsgsUfgCfgAfuAfUfGfuGfgAfuGfgAf | 277 | usCfscAfuCfcAfcauAfuCfgCfaCfgsUfs | 278 |
| | susUf | | u | |
| D-2056 | UfsgsGfaUfgGfaGfGfAfgUfgAfgUfgAf | 279 | usCfsaCfuCfaCfuccUfcCfaUfcCfasUfs | 280 |
| | susUf | | u | |
| D-2057 | AfscsGfuAfcCfcUfUfCfaUfuGfaUfgUf | 281 | asCfsaUfcAfaUfgaaGfgGfuAfcGfusUfs | 282 |
| | susUf | | u | |
| D-2058 | UfsgsGfaCfaUfcAfCfCfaAfgCfuCfaUf | 283 | asUfsgAfgCfuUfgguGfaUfgUfcCfasUfs | 284 |
| | susUf | | u | |
| D-2059 | CfsasCfcUfgCfgUfCfUfcAfgCfaUfcUf | 285 | asGfsaUfgCfuGfagaCfgCfaGfgUfgsUfs | 286 |
| | susUf | | u | |
| D-2060 | AfscsCfuGfcGfuCfUfCfaGfcAfuCfcUf | 287 | asGfsgAfuGfcUfgagAfcGfcAfgGfusUfs | 288 |
| | susUf | | u | |
| D-2061 | CfscsAfgAfgAfcUfGfGfuGfaCfaUfgUf | 289 | asCfsaUfgUfcAfccaGfuCfuCfuGfgsUfs | 290 |
| | susUf | | u | |
| D-2062 | AfsusGfgCfuUfcCfAfGfaUfaUfgCfcUf | 291 | asGfsgCfaUfaUfcugGfaAfgCfcAfusUfs | 292 |
| | susUf | | u | |
| D-2063 | CfscsGfcCfuCfcAfGfGfuCfcCfaAfaUf | 293 | asUfsuUfgGfgAfccuGfgAfgGfcGfgsUfs | 294 |
| | susUf | | u | |
| D-2064 | UfsasCfcUfgCfuGfGfUfgCfuGfaGfgUf | 295 | asCfscUfcAfgCfaccAfgCfaGfgUfasUfs | 296 |
| | susUf | | u | |
| D-2065 | AfscsCfuGfcUfgGfUfGfcUfgAfgGfgUf | 297 | asCfscCfuCfaGfcacCfaGfcAfgGfusUfs | 298 |
| | susUf | | u | |
| D-2066 | CfsusCfuCfcAfcCfUfUfuCfcCfaGfuUf | 299 | asAfscUfgGfgAfaagGfuGfgAfgAfgsUfs | 300 |
| | susUf | | u | |
| D-2067 | UfsusUfuUfcAfcCfUfAfaCfuAfaAfaUf | 301 | asUfsuUfuAfgUfuagGfuGfaAfaAfasUfs | 302 |
| | susUf | | u | |
| D-2068 | CfgGfcCfaAfuGfUfCfcAfcCfaGfcUfsu | 303 | asGfscUfgGfuGfgacAfuUfgGfcCfgsUfs | 304 |
| | sUf | | u | |
| D-2069 | GfgUfcCfaGfcCfUfGfaAfcUfuCfuUfsu | 305 | asAfsgAfaGfuUfcagGfcUfgGfaCfcsUfs | 306 |
| | sUf | | u | |
| D-2070 | GfcGfgCfuUfcCfUfGfgGfcUfuCfuAfsu | 307 | usAfsgAfaGfcCfcagGfaAfgCfcGfcsUfs | 308 |
| | sUf | | u | |
| D-2071 | GfuGfaCfaAfcGfUfAfcCfcUfuCfaUfsu | 309 | asUfsgAfaGfgGfuacGfuUfgUfcAfcsUfs | 310 |
| | sUf | | u | |
| D-2072 | GfgUfaUfgUfuCfCfUfgCfuUfcAfuGfsu | 311 | csAfsuGfaAfgCfaggAfaCfaUfaCfcsUfs | 312 |
| | sUf | | u | |
| D-2073 | GfuAfuGfuUfcCfUfGfcUfuCfaUfgCfsu | 313 | gsCfsaUfgAfaGfcagGfaAfcAfuAfcsUfs | 314 |
| | sUf | | u | |
| D-2074 | UfgUfuCfcUfgCfUfUfcAfuGfcCfcUfsu | 315 | asGfsgGfcAfuGfaagCfaGfgAfaCfasUfs | 316 |
| | sUf | | u | |
| D-2075 | GfuUfcCfuGfcUfUfCfaUfgCfcCfuUfsu | 317 | asAfsgGfgCfaUfgaaGfcAfgGfaAfcsUfs | 318 |
| | sUf | | u | |
| D-2076 | CfcUfgCfuUfcAfUfGfcCfcUfuCfuAfsu | 319 | usAfsgAfaGfgGfcauGfaAfgCfaGfgsUfs | 320 |
| | sUf | | u | |
| D-2077 | GfcUfuCfaUfgCfCfCfuUfcUfaCfaGfsu | 321 | csUfsgUfaGfaAfgggCfaUfgAfaGfcsUfs | 322 |
| | sUf | | u | |
| D-2078 | CfuUfcAfuGfcCfCfUfuCfuAfcAfgUfsu | 323 | asCfsuGfuAfgAfaggGfcAfuGfaAfgsUfs | 324 |
| | sUf | | u | |
| D-2079 | UfuCfaUfgCfcCfUfUfcUfaCfaGfuGfsu | 325 | csAfscUfgUfaGfaagGfgCfaUfgAfasUfs | 326 |
| | sUf | | u | |
| D-2080 | AfuGfgCfuUfcCfAfGfaUfaUfgCfcUfsu | 327 | asGfsgCfaUfaUfcugGfaAfgCfcAfusUfs | 328 |
| | sUf | | u | |
| D-2081 | AfuGfcCfcUfuCfUfAfcAfgUfgGfcCfsu | 329 | gsGfscCfaCfuGfuagAfaGfgGfcAfusUfs | 330 |
| | sUf | | u | |
| D-2082 | GfcUfuCfaUfgCfCfCfuUfcUfaCfaUfsu | 331 | asUfsgUfaGfaAfgggCfaUfgAfaGfcsUfs | 332 |
| | sUf | | u | |
| D-2083 | {Phosphate}GfsgsAfaAfgAfcUfGfUfu | 1295 | {Phosphate}usUfsuUfuGfgAfacaGfuCf | 1296 |
| | CfcAfoAfaAfsusUf | | uUfuCfcsUfsu | |
| D-2084 | {GalNAc3K2AhxC6}ggsuaugUfuCfCfUf | 1297 | {Phosphate}csAfsuGfaAfGfcaggAfaCf | 1298 |
| | Gfcuucaugsusu | | auaccsusu | |
| D-2085 | {GalNAc3K2AhxC6}guauguUfcCfUfGfC | 1299 | {Phosphate}gsCfsaUfgAfAfgcagGfaAf | 1300 |
| | fuucaugcsusu | | cauacsusu | |
| D-2086 | {GalNAc3K2AhxC6}uguuccUfgCfUfUfC | 1301 | {Phosphate}asGfsgGfcAfUfgaagCfaGf | 1302 |
| | faugcccususu | | gaacasusu | |
| D-2087 | {GalNAc3K2AhxC6}gcuucaUfgCfCfCfU | 1303 | {Phosphate}csUfsgUfaGfAfagggCfaUf | 1304 |
| | fucuacagsusu | | gaagcsusu | |
| D-2088 | {GalNAc3K2AhxC6}cuucauGfcCfCfUfU | 1305 | {Phosphate}asCfsuGfuAfGfaaggGfcAf | 1306 |
| | fcuacagususu | | ugaagsusu | |
| D-2089 | {GalNAc3K2AhxC6}gcggcuUfcCfUfGfG | 1307 | {Phosphate}usAfsgAfaGfCfccagGfaAf | 1308 |
| | fgcuucuasusu | | gccgcsusu | |
| D-2090 | {GalNAc3K2AhxC6}guuccuGfcUfUfCfA | 1309 | {Phosphate}asAfsgGfgCfAfugaaGfcAf | 1310 |
| | fugcccuususu | | ggaacsusu | |
| D-2091 | {GalNAc3K2AhxC6}AfuGfgCfuUfcCfAf | 1311 | {Phosphate}asGfsgCfaUfaUfcugGfaAf | 1312 |
| | GfaUfaUfgCfcUfsusUf | | gCfcAfusUfsu | |
| D-2092 | {GalNAc3K2AhxC6}ccugcuUfcAfUfGfC | 1313 | {Phosphate}usAfsgAfaGfGfgcauGfaAf | 1314 |
| | fccuucuasusu | | gcaggsusu | |
| D-2093 | {GalNAc3K2AhxC6}uucaugCfcCfUfUfC | 1315 | {Phosphate}asAfscUfgUfAfgaagGfgCf | 1316 |
| | fuacaguususu | | augaasusu | |
| D-2094 | {GalNAc3K2AhxC6}uucaugCfcCfUfUfC | 1317 | {Phosphate}csAfscUfgUfAfgaagGfgCf | 1318 |
| | fuacagugsusu | | augaasusu | |
| D-2095 | {GalNAc3K2AhxC6}gcuucaUfgCfCfCfU | 1319 | {Phosphate}asUfsgUfaGfAfagggCfaUf | 1320 |
| | fucuacaususu | | gaagcsusu | |
| D-2096 | {GalNAc3K2AhxC6}gguccaGfcCfUfGfA | 1321 | {Phosphate}asAfsgAfaGfUfucagGfcUf | 1322 |
| | facuucuususu | | ggaccsusu | |
| D-2097 | {GalNAc3K2AhxC6}GfcGfgCfuUfcCfUf | 1323 | {Phosphate}usAfsgAfaGfCfccagGfaAf | 1324 |
| | GfGfgcUfuCfuAfsusUf | | gCfcGfcsUfsu | |
| D-2098 | {GalNAc3K2AhxC6}GfcGfgCfuUfcCfuG | 1325 | {Phosphate}usAfsgAfaGfCfccAfgGfaA | 1326 |
| | fGfgcUfuCfuAfsusUf | | fgCfcGfcsUfsu | |
| D-2099 | {GalNAc3K2AhxC6}GfuUfcCfuGfcUfUf | 1327 | {Phosphate}asAfsgGfgCfAfugaaGfcAf | 1328 |
| | CfAfugCfcCfuUfsusUf | | gGfaAfcsUfsu | |
| D-2100 | {GalNAc3K2AhxC6}GfuUfcCfuGfcUfuC | 1329 | {Phosphate}asAfsgGfgCfAfugAfaGfcA | 1330 |
| | fAfugCfcCfuUfsusUf | | fgGfaAfcsUfsu | |
| D-2101 | {GalNAc3K2AhxC6}CfcUfgCfuUfcAfUf | 1331 | {Phosphate}usAfsgAfaGfGfgcauGfaAf | 1332 |
| | GfCfccUfuCfuAfsusUf | | gCfaGfgsUfsu | |
| D-2102 | {GalNAc3K2AhxC6}CfcUfgCfuUfcAfuG | 1333 | {Phosphate}usAfsgAfaGfGfgcAfuGfaA | 1334 |
| | fCfccUfuCfuAfsusUf | | fgCfaGfgsUfsu | |
| D-2103 | {GalNAc3K2AhxC6}augcccUfuCfUfAfC | 1335 | {Phosphate}gsGfscCfaCfUfguagAfaGf | 1336 |
| | faguggccsusu | | ggcaususu | |
| D-2104 | {GalNAc3K2AhxC6}auggcuUfcCfAfGfA | 1337 | {Phosphate}asGfsgCfaUfAfucugGfaAf | 1338 |
| | fuaugccususu | | gccaususu | |
| D-2105 | {GalNAc3K2AhxC6}gugacaAfcGfUfAfC | 1339 | {Phosphate}asUfsgAfaGfGfguacGfuUf | 1340 |
| | fccuucaususu | | gucacsusu | |
| D-2106 | {GalNAc3K2AhxC6}guauguUfcCfUfGfC | 1341 | {Phosphate}gsCfsaUfgAfAfgcAfgGfaA | 1342 |
| | fuucaugcsusu | | fcauacsusu | |
| D-2107 | {GalNAc3K2AhxC6}guauguUfcCfuGfCf | 1343 | {Phosphate}gsCfsaUfgAfAfgcagGfaAf | 1344 |
| | uucaugcsusu | | cauacsusu | |
| D-2108 | {GalNAc3K2AhxC6}guauguUfcCfuGfCf | 1345 | {Phosphate}gsCfsaUfgAfAfgcAfgGfaA | 1346 |
| | uucaugcsusu | | fcauacsusu | |
| D-2109 | {GalNAc3K2AhxC6}guauguUfcCfUfGfC | 1347 | {Phosphate}asGfsgCfaUfgAfAfgcagGf | 1348 |
| | fuucaugcscsu | | aAfcauacsusu | |
| D-2110 | {GalNAc3K2AhxC6}ugguauGfuUfCfCfU | 1349 | {Phosphate}gsCfsaUfgAfaGfCfaggaAf | 1350 |
| | fgcuucausgsu | | cAfuaccasusu | |
| D-2111 | {GalNAc3K2AhxC6}guauguUfcCfUfGfC | 1351 | {Phosphate}gsCfsaUfgAfAfgcagGfaAf | 1352 |
| | fuucausgsu | | cauacsusu | |
| D-2112 | {GalNAc3K2AhxC6}guauguUfcCfUfGfC | 1353 | {Phosphate}gsCfsaUfgAfAfgcagGfaAf | 1354 |
| | fuucaugcs{invAb} | | cauacsusu | |
| D-2113 | {GalNAc3K2AhxC6}GfcUfuCfaUfgCfCf | 1355 | {Phosphate}asUfsgUfaGfAfagggCfaUf | 1356 |
| | CfUfucUfaCfaUfsusUf | | gAfaGfcsUfsu | |
| D-2114 | {GalNAc3K2AhxC6}GfcUfuCfaUfgCfcC | 1357 | {Phosphate}asUfsgUfaGfAfagGfgCfaU | 1358 |
| | fUfucUfaCfaUfsusUf | | fgAfaGfcsUfsu | |
| D-2115 | {GalNAc3K2AhxC6}gcuucaUfgCfCfCfU | 1359 | {Phosphate}asusguaGfAfagggCfaUfga | 1360 |
| | fucuacaususu | | agcsusu | |
| D-2116 | {GalNAc3K2AhxC6}gcuucaUfgCfCfCfU | 1361 | {Phosphate}asusguaGfAfagggCfaUfga | 1362 |
| | fucUfaCfaUfsusUf | | agcsusu | |
| D-2117 | {GalNAc3K2AhxC6}GfcUfuCfaUfgCfCf | 1363 | {Phosphate}asusguaGfAfagggCfaUfga | 1364 |
| | CfUfucuacaususu | | agcsusu | |
| D-2118 | {GalNAc3K2AhxC6}gcuucaUfgCfCfCfU | 1365 | {Phosphate}asusguaGfAfagggCfaUfgA | 1366 |
| | fucuacaususu | | faGfcsUfsu | |
| D-2119 | {GalNAc3K2AhxC6}gcuucaUfgCfCfCfU | 1367 | {Phosphate}asUfsgUfaGfAfagggCfaUf | 1368 |
| | fucuacaususu | | gAfaGfcsUfsu | |
| D-2120 | {GalNAc3K2AhxC6}GfcUfuCfaUfgCfCf | 1369 | {Phosphate}asusguaGfAfagggCfaUfga | 1370 |
| | CfUfucUfaCfaUfsusUf | | agcsusu | |
| D-2121 | {GalNAc3K2AhxC6}GfcUfuCfaUfgCfCf | 1371 | {Phosphate}asUfsgUfaGfAfagggCfaUf | 1372 |
| | CfUfucuacaususu | | gaagcsusu | |
| D-2122 | {GalNAc3K2AhxC6}gcuucaUfgCfCfCfU | 1373 | {Phosphate}asusguaGfAfagggCfaUfgA | 1374 |
| | fucUfaCfaUfsusUf | | faGfcsUfsu | |
| D-2123 | {GalNAc3K2AhxC6}gcuucaUfgCfCfCfU | 1375 | {Phosphate}asUfsgUfaGfAfagggCfaUf | 1376 |
| | fucUfaCfaUfsusUf | | gaagcsusu | |
| D-2124 | {GalNAc3K2AhxC6}GfcUfuCfaUfgCfCf | 1377 | {Phosphate}asusguaGfAfagggCfaUfgA | 1378 |
| | CfUfucuacaususu | | faGfcsUfsu | |
| D-2125 | {GalNAc3K2AhxC6}GfcUfuCfaUfgCfCf | 1379 | {Phosphate}asUfsgUfaGfAfagggCfaUf | 1380 |
| | CfUfucuacaususu | | gAfaGfcsUfsu | |
| D-2126 | {GalNAc3K2AhxC6}gcuucaUfgCfCfCfU | 1381 | {Phosphate}asUfsgUfaGfAfagggCfaUf | 1382 |
| | fucUfaCfaUfsusUf | | gAfaGfcsUfsu | |
| D-2127 | {GalNAc3K2AhxC6}GfcUfuCfaUfgCfCf | 1383 | {Phosphate}asUfsgUfaGfAfagggCfaUf | 1384 |
| | CfUfucUfaCfaUfsusUf | | gaagcsusu | |
| D-2128 | {GalNAc3K2AhxC6}GfcUfuCfaUfgCfCf | 1385 | {Phosphate}asusguaGfAfagggCfaUfgA | 1386 |
| | CfUfucUfaCfaUfsusUf | | faGfcsUfsu | |
| D-2129 | {GalNAc3K2AhxC6}gcuucaUfg[dC]CfC | 1387 | {Phosphate}asUfsgUfaGfAfagggCfaUf | 1388 |
| | fuucuacaususu | | gaagcsusu | |
| D-2130 | {GalNAc3K2AhxC6}gcuucaUfgCfCf[dC] | 1389 | {Phosphate}asUfsgUfaGfAfagggCfaUf | 1390 |
| | Ufucuacaususu | | gaagcsusu | |
| D-2131 | {GalNAc3K2AhxC6}gcuucaUfgCf[dC]C | 1391 | {Phosphate}asUfsgUfaGfAfagggCfaUf | 1392 |
| | fUfucuacaususu | | gaagcsusu | |
| D-2132 | {GalNAc3K2AhxC6}gcuucaUfgCfCfCfU | 1393 | {Phosphate}asUfsgUfaGfAfagGfgCfaU | 1394 |
| | fucuacaususu | | fgaagcsusu | |
| D-2133 | {GalNAc3K2AhxC6}gcuucaUfgCfcCfUf | 1395 | {Phosphate}asUfsgUfaGfAfagggCfaUf | 1396 |
| | ucuacaususu | | gaagcsusu | |
| D-2134 | {GalNAc3K2AhxC6}gcuucaUfgCfcCfUf | 1397 | {Phosphate}asUfsgUfaGfAfagGfgCfaU | 1398 |
| | ucuacaususu | | fgaagcsusu | |
| D-2135 | {GalNAc3K2AhxC6}GfscsUfuCfaUfgCf | 1399 | {Phosphate}asUfsgUfaGfAfagggCfaUf | 1400 |
| | cCfUfucUfaCfaUfsusUf | | gAfaGfcsUfsu | |
| D-2136 | {GalNAc3K2AhxC6}GfscsUfuCfaUfgCf | 1401 | {Phosphate}asUfsgUfaGfAfagGfgCfaU | 1402 |
| | CfCfUfucUfaCfaUfsusUf | | fgAfaGfcsUfsu | |
| D-2137 | {GalNAc3K2AhxC6}gcuucaUfgCfCfCfU | 1403 | {Phosphate}asAfscUfgUfaGfAfagggCf | 1404 |
| | fucuacagsusu | | aUfgaagcsusu | |
| D-2138 | {GalNAc3K2AhxC6}cugcuuCfaUfGfCfC | 1405 | {Phosphate}asUfsgUfaGfaAfGfggcaUf | 1406 |
| | fcuucuacsasu | | gAfagcagsusu | |
| D-2139 | {GalNAc3K2AhxC6}gcuucaUfgCfCfCfU | 1407 | {Phosphate}asUfsgUfaGfAfagggCfaUf | 1408 |
| | fucuacsasu | | gaagcsusu | |
| D-2140 | {GalNAc3K2AhxC6}gcuucaUfgCfCfCfU | 1409 | {Phosphate}asUfsgUfaGfAfagggCfaUf | 1410 |
| | fucuacaus{invAb} | | gaagcsusu | |
| D-2141 | {GalNAc3K2AhxC6}gcuucaUfgCfCfCfU | 1411 | {Phosphate}asUfsgUfaGfAfagggCfaUf | 1412 |
| | fucuacauuus{invAb} | | gaagcsusu | |
| D-2142 | {GalNAc3K2AhxC6}gcuucaUfgCfCfCfU | 1413 | {Phosphate}AfsusGfuAfgAfagggCfaUf | 1414 |
| | fucuacaususu | | gaagcsusu | |
| D-2143 | {GalNAc3K2AhxC6}gcuucaUfgCfCfCfU | 1415 | {Phosphate}AfsusGfuAfgAfagggCfaUf | 1416 |
| | fuCfuacaususu | | gaagcsusu | |
| D-2144 | {GalNAc3K2AhxC6}gcuucaugCfCfCfUf | 1417 | {Phosphate}asUfsgUfaGfAfagggCfaUf | 1418 |
| | ucuacaususu | | gaagcsusu | |
| D-2145 | {GalNAc3K2AhxC6}gcuucaUfgCfCfCfU | 1419 | {Phosphate}asUfsgUfaGfAfagggCfaug | 1420 |
| | fucuacaususu | | aagcsusu | |
| D-2146 | {GalNAc3K2AhxC6}gcuucaUfgCfCfCfU | 1421 | {Phosphate}asusgUfaGfAfagggCfaUfg | 1422 |
| | fucuacaususu | | aagcsusu | |
| D-2147 | {GalNAc3K2AhxC6}gcuucaUfgCfCfCfU | 1423 | {Phosphate}asUfsgUfagAfagggCfaUfg | 1424 |
| | fucuacaususu | | aagcsusu | |
| D-2148 | {GalNAc3K2AhxC6}gcuucaUfgCfCfCfU | 1425 | {Phosphate}asusgUfagAfagggCfaUfga | 1426 |
| | fucuacaususu | | agcsusu | |
| D-2149 | {GalNAc3K2AhxC6}gcuucaUfgCfCfCfU | 1427 | {Phosphate}asUfsguagAfagggCfaUfga | 1428 |
| | fucuacaususu | | agcsusu | |
| D-2150 | {GalNAc3K2AhxC6}gcuucaUfgCfCfCfU | 1429 | {Phosphate}asusguagAfagggCfaUfgaa | 1430 |
| | fucuacaususu | | gcsusu | |
| D-2151 | {GalNAc3K2AhxC6}guauguUfcCfUfGfC | 1431 | {Phosphate}gsCfsaUfgAfAfgcagGfaAf | 1432 |
| | fuucaugcuus{invAb} | | cauacsusu | |
| D-2152 | {GalNAc3K2AhxC6}gguaugUfuCfCfUfG | 1433 | {Phosphate}aAfsuGfaAfGfcaggAfaCfa | 1434 |
| | fcuucauususu | | uaccsusu | |
| D-2153 | {GalNAc3K2AhxC6}guauguUfcCfUfGfC | 1435 | {Phosphate}asCfsaUfgAfAfgcagGfaAf | 1436 |
| | fuucaugususu | | cauacsusu | |
| D-2154 | {GalNAc3K2AhxC6}cggccaAfuGfUfCfC | 1437 | {Phosphate}asGfscUfgGfUfggacAfuUf | 1438 |
| | faccagcususu | | ggccgsusu | |
| D-2155 | {GalNAc3K2AhxC6}uggagcAfgAfCfUfC | 1439 | {Phosphate}asCfscUfgCfAfgaguCfuGf | 1440 |
| | fugcaggususu | | cuccasusu | |
| D-2156 | {GalNAc3K2AhxC6}acguacCfcUfUfCfA | 1441 | {Phosphate}aCfsaUfcAfAfugaaGfgGfu | 1442 |
| | fuugaugususu | | acgususu | |
| D-2157 | {GalNAc3K2AhxC6}ccagagAfcUfGfGfU | 1443 | {Phosphate}asCfsaUfgUfCfaccaGfuCf | 1444 |
| | fgacaugususu | | ucuggsusu | |
| D-2158 | {GalNAc3K2AhxC6}[invAb]gcuucaUfg | 1445 | {Phosphate}asUfsgUfaGfAfaaggCfaUf | 1446 |
| | CfCfUfUfucuacaususu | | gaagcsusu | |
| D-2159 | {GalNAc3K2AhxC6}[invAb]gcuucaUfg | 1447 | {Phosphate}asAfsaUfgUfaGfAfaaggCf | 1448 |
| | CfCfUfUfucuacaususu | | aUfgaagcsusu | |
| D-2160 | {GalNAc3K2AhxC6}[InvAb]gcuucaUfg | 1449 | {Phosphate}asAfsaUfgUfAfgaaaGfgCf | 1450 |
| | CfcUfUfUfCfuacaususu | | aUfgaagcsusu | |
| D-2161 | {GalNAc3K2AhxC6}ugcuucAfuGfCfCfU | 1451 | {Phosphate}usGfsuAfgAfAfaggcAfuGf | 1452 |
| | fuucuacasusu | | aagcasusu | |
| D-2162 | {GalNAc3K2AhxC6}uauguuCfcUfGfCfU | 1453 | {Phosphate}asGfscAfuGfAfagcaGfgAf | 1454 |
| | fucaugcususu | | acauasusu | |
| D-2163 | {GalNAc3K2AhxC6luuccugCfuUfCfAfU | 1455 | {Phosphate}asAfsaAfgGfCfaugaAfgCf | 1456 |
| | fgccuuuususu | | aggaasusu | |
| D-2164 | {GalNAc3K2AhxC6}ucaugcCfuUfUfCfU | 1457 | {Phosphate}asCfsaCfuGfUfagaaAfgGf | 1458 |
| | facagugususu | | caugasusu | |
| D-2165 | {GalNAc3K2AhxC6}caugccUfuUfCfUfA | 1459 | {Phosphate}asCfscAfcUfGfuagaAfaGf | 1460 |
| | fcaguggususu | | gcaugsusu | |
| D-2166 | {GalNAc3K2AhxC6}augccuUfuCfUfAfC | 1461 | {Phosphate}asGfscCfaCfUfguagAfaAf | 1462 |
| | faguggcususu | | ggcaususu | |
| D-2167 | {GalNAc3K2AhxC6}gguaugUfuCfCfUfG | 1463 | {Phosphate}usAfsuGfaAfGfcaggAfaCf | 1464 |
| | fcuucauasusu | | auaccsusu | |
| D-2168 | {GalNAc3K2AhxC6}guauguUfcCfUfGfC | 1465 | {Phosphate}usCfsaUfgAfAfgcagGfaAf | 1466 |
| | fuucaugasusu | | cauacsusu | |
| D-2169 | {GalNAc3K2AhxC6}uauguuCfcUfGfCfU | 1467 | {Phosphate}usGfscAfuGfAfagcaGfgAf | 1468 |
| | fucaugcasusu | | acauasusu | |
| D-2170 | {GalNAc3K2AhxC6}uuccugCfuUfCfAfU | 1469 | {Phosphate}usAfsaAfgGfCfaugaAfgCf | 1470 |
| | fgccuuuasusu | | aggaasusu | |
| D-2171 | {GalNAc3K2AhxC6}cugcuuCfaUfGfCfC | 1471 | {Phosphate}usUfsaGfaAfAfggcaUfgAf | 1472 |
| | fuuucuaasusu | | agcagsusu | |
| D-2172 | {GalNAc3K2AhxC6}gcuucaUfgCfCfUfU | 1473 | {Phosphate}usUfsgUfaGfAfaaggCfaUf | 1474 |
| | fucuacaasusu | | gaagcsusu | |
| D-2173 | {GalNAc3K2AhxC6}uucaugCfcUfUfUfC | 1475 | {Phosphate}usAfscUfgUfAfgaaaGfgCf | 1476 |
| | fuacaguasusu | | augaasusu | |
| D-2174 | {GalNAc3K2AhxC6}ucaugcCfuUfUfCfU | 1477 | {Phosphate}usCfsaCfuGfUfagaaAfgGf | 1478 |
| | facagugasusu | | caugasusu | |
| D-2175 | {GalNAc3K2AhxC6}caugccUfuUfCfUfA | 1479 | {Phosphate}usCfscAfcUfGfuagaAfaGf | 1480 |
| | fcaguggasusu | | gcaugsusu | |
| D-2176 | {GalNAc3K2AhxC6}augccuUfuCfUfAfC | 1481 | {Phosphate}usGfscCfaCfUfguagAfaAf | 1482 |
| | faguggcasusu | | ggcaususu | |
| D-2177 | {GalNAc3K2AhxC6}acguacCfcUfUfCfA | 1483 | {Phosphate}usCfsaUfcAfAfugaaGfgGf | 1484 |
| | fuugaugasusu | | uacgususu | |
| D-2178 | {GalNAc3K2AhxC6}ccagagAfcUfGfGfU | 1485 | {Phosphate}usCfsaUfgUfCfaccaGfuCf | 1486 |
| | fgacaugasusu | | ucuggsusu | |
| D-2179 | {GalNAc3K2AhxC6}auggcuUfcCfAfGfA | 1487 | {Phosphate}usGfsgCfaUfAfucugGfaAf | 1488 |
| | fuaugccasusu | | gccaususu | |
| D-2180 | {GalNAc3K2AhxC6}guuccuGfcUfUfCfA | 1489 | {Phosphate}asAfsaGfgCfAfugaaGfcAf | 1490 |
| | fugccuuususu | | ggaacsusu | |
| D-2181 | {GalNAc3K2AhxC6}ccugcuUfcAfUfGfC | 1491 | {Phosphate}usAfsgAfaAfGfgcauGfaAf | 1492 |
| | fcuuucuasusu | | gcaggsusu | |
| D-2182 | {GalNAc3K2AhxC6}gcuucaUfgCfCfUfU | 1493 | {Phosphate}asUfsgUfaGfAfaaggCfaUf | 1494 |
| | fucuacaususu | | gaagcsusu | |
| D-2183 | {GalNAc3K2AhxC6}cuucauGfcCfUfUfU | 1495 | {Phosphate}asCfsuGfuAfGfaaagGfcAf | 1496 |
| | fcuacagususu | | ugaagsusu | |
| D-2184 | {GalNAc3K2AhxC6}uucaugCfcUfUfUfC | 1497 | {Phosphate}asAfscUfgUfAfgaaaGfgCf | 1498 |
| | fuacaguususu | | augaasusu | |
| D-2185 | {GalNAc3K2AhxC6}gcuucaUfcCfCfUfU | 1499 | {Phosphate}asUfsgUfaGfAfaaggGfaUf | 1500 |
| | fucuacaususu | | gaagcsusu | |
| D-2186 | {GalNAc3K2AhxC6}[invAb]gcuucaUfg | 1501 | {Phosphate}asUfsgUfaGfAfagggCfaUf | 1502 |
| | CfCfCfUfucuacaususu | | gaagcsusu | |
| D-2187 | {GalNAc3K2AhxC6}[invAb]gcuucaUfg | 1503 | {Phosphate}asAfsaUfgUfaGfAfagggCf | 1504 |
| | CfCfCfUfucuacaususu | | aUfgaagcsusu | |
| D-2188 | {GalNAc3K2AhxC6}[invAb]gcuucaUfg | 1505 | {Phosphate}asAfsaUfgUfAfgaagGfgCf | 1506 |
| | CfcCfUfUfCfuacaususu | | aUfgaagcsusu | |
| D-2189 | {GalNAc3K2AhxC6}[invAb]gcggcuUfc | 1507 | {Phosphate}usAfsgAfaGfCfccagGfaAf | 1508 |
| | CfUfGfGfgcuucuasusu | | gccgcsusu | |
| D-2190 | {GalNAc3K2AhxC6}[invAb]CfuGfcGfg | 1509 | {Phosphate}usAfsgAfaGfCfccAfgGfaA | 1510 |
| | CfuUfcCfuGfGfgcUfuCfsusAf | | fgCfcGfcAfgsUfsu | |
| D-2191 | {GalNAc3K2AhxC6}cugcggCfuUfCfCfU | 1511 | {Phosphate}usAfsgAfaGfcCfCfaggaAf | 1512 |
| | fgggcuucus{invAb} | | gCfcgcagsusu | |
| D-2192 | {GalNAc3K2AhxC6}[invAb]cugcggCfu | 1513 | {Phosphate}usAfsgAfaGfcCfCfaggaAf | 1514 |
| | UfCfCfUfgggcuucsusa | | gCfcgcagsusu | |
| D-2193 | {GalNAc3K2AhxC6}[invAb]gcggcuUfc | 1515 | {Phosphate}usAfsgAfaGfCfccagGfaAf | 1516 |
| | CfUfGfGfgcUfuCfuAfsusUf | | gccgcsusu | |
| D-2194 | {GalNAc3K2AhxC6}cugcggCfuUfCfCfU | 1517 | {Phosphate}usAfsgAfaGfcCfCfaggaAf | 1518 |
| | fggGfcUfuCfus{invAb} | | gCfcgcagsusu | |
| D-2195 | {GalNAc3K2AhxC6}[invAb]cugcggCfu | 1519 | {Phosphate}usAfsgAfaGfcCfCfaggaAf | 1520 |
| | UfCfCfUfggGfcUfuCfsusAf | | gCfcgcagsusu | |
| D-2196 | {GalNAc3K2AhxC6}[invAb]GfcGfgCfu | 1521 | {hosphate}usAfsgAfaGfCfccAfgGfaA | 1522 |
| | UfcCfuGfGfgcUfuCfuAfsusUf | | fgCfcGfcsUfsu | |
| D-2197 | {GalNAc3K2AhxC6}CfuGfcGfgCfuUfcC | 1523 | {Phosphate}usAfsgAfaGfcCfCfagGfaA | 1524 |
| | fUfggGfcUfuCfus{invAb} | | fgCfcGfcAfgsUfsu | |
| D-2198 | {GalNAc3K2AhxC6}[invAb]CfuGfcGfg | 1525 | {Phosphate}usAfsgAfaGfcCfCfagGfaA | 1526 |
| | CfuUfcCfUfggGfcUfuCfsusAf | | fgCfcGfcAfgsUfsu | |
| D-2199 | {GalNAc3K2AhxC6}[invAb]GfcGfgCfu | 1527 | {Phosphate}usAfsgAfaGfCfccagGfaAf | 1528 |
| | UfcCfUfGfGfgcuucuasusu | | gCfcGfcsUfsu | |
| D-2200 | {GalNAc3K2AhxC6}[invAb]CfuGfcGfg | 1529 | {Phosphate}usAfsgAfaGfcCfCfaggaAf | 1530 |
| | CfuUfCfCfUfgggcuucsusa | | gCfcGfcAfgsUfsu | |
| D-2201 | {GalNAc3K2AhxC6}[invAb]cugcggcuU | 1531 | {Phosphate}usAfsgAfaGfCfccagGfaAf | 1532 |
| | fcCfUfGfGfgcUfuCfusAf | | gccgcagsusu | |
| D-2202 | {GalNAc3K2AhxC6}[invAb]CfuGfcGfg | 1533 | {Phosphate}usAfsgAfaGfCfccagGfaAf | 1534 |
| | CfuUfcCfUfGfGfgcuucsusa | | gCfcGfcAfgsUfsu | |
| D-2203 | {GalNAc3K2AhxC6}[invAb]auggcuUfc | 1535 | {Phosphate}asGfsgCfaUfAfucugGfaAf | 1536 |
| | CfAfGfAfuaugccususu | | gccaususu | |
| D-2204 | {GalNAc3K2AhxC6}[invAb]AfcAfuGfg | 1537 | {Phosphate}asGfsgCfaUfAfucUfgGfaA | 1538 |
| | CfuUfcCfaGfAfuaUfgCfscsUf | | fgCfcAfuGfusUfsu | |
| D-2205 | {GalNAc3K2AhxC6}acauggCfuUfCfCfA | 1539 | {Phosphate}asGfsgCfaUfaUfCfuggaAf | 1540 |
| | fgauaugccs{invAb} | | gCfcaugususu | |
| D-2206 | {GalNAc3K2AhxC6}[invAb]acauggCfu | 1541 | {Phosphate}asGfsgCfaUfaUfCfuggaAf | 1542 |
| | UfCfCfAfgauaugcscsu | | gCfcaugususu | |
| D-2207 | {GalNAc3K2AhxC6}[invAb]auggcuUfc | 1543 | {Phosphate}asGfsgCfaUfAfucugGfaAf | 1544 |
| | CfAfGfAfuaUfgCfcUfsusUf | | gccaususu | |
| D-2208 | {GalNAc3K2AhxC6}acauggCfuUfCfCfA | 1545 | {Phosphate}asGfsgCfaUfaUfCfuggaAf | 1546 |
| | fgaUfaUfgCfcs{invAb} | | gCfcaugususu | |
| D-2209 | {GalNAc3K2AhxC6}[invAb]acauggCfu | 1547 | {Phosphate}asGfsgCfaUfaUfCfuggaAf | 1548 |
| | UfCfCfAfgaUfaUfgCfscsUf | | gCfcaugususu | |
| D-2210 | {GalNAc3K2AhxC6}[invAb]AfuGfgCfu | 1549 | {Phosphate}asGfsgCfaUfAfucUfgGfaA | 1550 |
| | UfcCfaGfAfuaUfgCfcUfsusUf | | fgCfcAfusUfsu | |
| D-2211 | {GalNAc3K2AhxC6}AfcAfuGfgCfuUfcC | 1551 | {Phosphate}asGfsgCfaUfaUfCfugGfaA | 1552 |
| | fAfgaUfaUfgCfcs{invAb} | | fgCfcAfuGfusUfsu | |
| D-2212 | {GalNAc3K2AhxC6}[invAb]AfcAfuGfg | 1553 | {Phosphate}asGfsgCfaUfaUfCfugGfaA | 1554 |
| | CfuUfcCfAfgaUfaUfgCfscsUf | | fgCfcAfuGfusUfsu | |
| D-2213 | {GalNAc3K2AhxC6}[invAb]AfuGfgCfu | 1555 | {Phosphate}asGfsgCfaUfAfucugGfaAf | 1556 |
| | UfcCfAfGfAfuaugccususu | | gCfcAfusUfsu | |
| D-2214 | {GalNAc3K2AhxC6}AfcAfuGfgCfuUfCf | 1557 | {Phosphate}asGfsgCfaUfaUfCfuggaAf | 1558 |
| | CfAfgauaugccs{invAb} | | gCfcAfuGfusUfsu | |
| D-2215 | {GalNAc3K2AhxC6}[invAb]AfcAfuGfg | 1559 | {Phosphate}asGfsgCfaUfaUfCfuggaAf | 1560 |
| | CfuUfCfCfAfgauaugcscsu | | gCfcAfuGfusUfsu | |
| D-2216 | {GalNAc3K2AhxC6}[invAb]acauggcuU | 1561 | {Phosphate}asGfsgCfaUfAfucugGfaAf | 1562 |
| | fcCfAfGfAfuaugcscsu | | gccaugususu | |
| D-2217 | {GalNAc3K2AhxC6}[invAb]acauggcuU | 1563 | {Phosphate}asGfsgCfaUfAfucugGfaAf | 1564 |
| | fcCfAfGfAfuaUfgCfcsUf | | gccaugususu | |
| D-2218 | {GalNAc3K2AhxC6}[invAb]AfcAfuGfg | 1565 | {Phosphate}asGfsgCfaUfAfucugGfaAf | 1566 |
| | CfuUfcCfAfGfAfuaugcscsu | | gCfcAfuGfusUfsu | |
| D-2219 | {GalNAc3K2AhxC6}[invAb]acguacCfc | 1567 | {Phosphate}asCfsaUfcAfAfugaaGfgGf | 1568 |
| | UfUfCfAfuugaugususu | | uacgususu | |
| D-2220 | {GalNAc3K2AhxC6}[invAb]CfaAfcGfu | 1569 | {Phosphate}asCfsaUfcAfAfugAfaGfgG | 1570 |
| | AfcCfcUfuCfAfuuGfaUfsgsUf | | fuAfcGfuUfgsUfsu | |
| D-2221 | {GalNAc3K2AhxC6}[invAb]caacguAfc | 1571 | {Phosphate}asCfsaUfcAfaUfGfaaggGf | 1572 |
| | CfCfUfUfcauugausgsu | | uAfcguugsusu | |
| D-2222 | {GalNAc3K2AhxC6}[invAb]acguacCfc | 1573 | {Phosphate}asCfsaUfcAfAfugaaGfgGf | 1574 |
| | UfUfCfAfuuGfaUfgUfsusUf | | uacgususu | |
| D-2223 | {GalNAc3K2AhxC6}caacguAfcCfCfUfU | 1575 | {Phosphate}asCfsaUfcAfaUfGfaaggGf | 1576 |
| | fcaUfuGfaUfgs{invAb} | | uAfcguugsusu | |
| D-2224 | {GalNAc3K2AhxC6}[invAb]AfcGfuAfc | 1577 | {Phosphate}asCfsaUfcAfAfugAfaGfgG | 1578 |
| | CfcUfuCfAfuuGfaUfgUfsusUf | | fuAfcGfusUfsu | |
| D-2225 | {GalNAc3K2AhxC6}CfaAfcGfuAfcCfcU | 1579 | {Phosphate}asCfsaUfcAfaUfGfaaGfgG | 1580 |
| | fUfcaUfuGfaUfgs{invAb} | | fuAfcGfuUfgsUfsu | |
| D-2226 | {GalNAc3K2AhxC6}[invAb]CfaAfcGfu | 1581 | {Phosphate}asCfsaUfcAfaUfGfaaGfgG | 1582 |
| | AfcCfcUfUfcaUfuGfaUfsgsUf | | fuAfcGfuUfgsUfsu | |
| D-2227 | {GalNAc3K2AhxC6}[invAb]AfcGfuAfc | 1583 | {Phosphate}asCfsaUfcAfAfugaaGfgGf | 1584 |
| | CfcUfUfCfAfuugaugususu | | uAfcGfusUfsu | |
| D-2228 | {GalNAc3K2AhxC6}CfaAfcGfuAfcCfCf | 1585 | {Phosphate}asCfsaUfcAfaUfGfaaggGf | 1586 |
| | UfUfcauugaugs{invAb} | | uAfcGfuUfgsUfsu | |
| D-2229 | {GalNAc3K2AhxC6}[invAb]CfaAfcGfu | 1587 | {Phosphate}asCfsaUfcAfaUfGfaaggGf | 1588 |
| | AfcCfCfUfUfcauugausgsu | | uAfcGfuUfgsUfsu | |
| D-2230 | {GalNAc3K2AhxC6}[invAb]caacguacC | 1589 | {Phosphate}asCfsaUfcAfAfugaaGfgGf | 1590 |
| | fcUfUfCfAfuugausgsu | | uacguugsusu | |
| D-2231 | {GalNAc3K2AhxC6}[invAb]caacguacC | 1591 | {Phosphate}asCfsaUfcAfAfugaaGfgGf | 1592 |
| | fcUfUfCfAfuuGfaUfgsUf | | uacguugsusu | |
| D-2232 | {GalNAc3K2AhxC6}[invAb]CfaAfcGfu | 1593 | {Phosphate}asCfsaUfcAfAfugaaGfgGf | 1594 |
| | AfcCfcUfUfCfAfuugausgsu | | uAfcGfuUfgsUfsu | |
| D-2233 | {GalNAc3K2AhxC6}cugcuucaUfgCfCfU | 1595 | {Phosphate}asUfsgUfaGfAfaaggCfaUf | 1596 |
| | fUfucuacsasu | | gaagcagsusu | |
| D-2234 | {GalNAc3K2AhxC6}cugcuucaUfgCfCfU | 1597 | {Phosphate}asUfsgUfaGfAfaaggCfaUf | 1598 |
| | fUfucUfaCfsasUf | | gaagcagsusu | |
| D-2235 | {GalNAc3K2AhxC6}[invAb]GfcUfuCfa | 1599 | {Phosphate}asUfsgUfaGfAfaaGfgCfaU | 1600 |
| | UfgCfcUfUfucUfaCfaUfsusUf | | fgAfaGfcsUfsu | |
| D-2236 | {GalNAc3K2AhxC6}[invAb]GfcUfuCfa | 1601 | {Phosphate}asUfsgUfaGfAfaaggCfaUf | 1602 |
| | UfgCfCfUfUfucuacaususu | | gAfaGfcsUfsu | |
| D-2237 | {GalNAc3K2AhxC6}CfuGfcUfuCfaUfgC | 1603 | {Phosphate}asUfsgUfaGfAfaaGfgCfaU | 1604 |
| | fcUfUfucUfaCfsasUf | | fgAfaGfcAfgsUfsu | |
| D-2238 | {GalNAc3K2AhxC6}CfuGfcUfuCfaUfgC | 1605 | {Phosphate}asUfsgUfaGfAfaaggCfaUf | 1606 |
| | fCfUfUfucuacsasu | | gAfaGfcAfgsUfsu | |
| D-2239 | {GalNAc3K2AhxC6}[invAb]CfuGfcUfu | 1607 | {Phosphate}asUfsgUfaGfAfaaggCfaUf | 1608 |
| | CfaUfgCfCfUfUfucuacsasu | | gAfaGfcAfgsUfsu | |
| D-2240 | {GalNAc3K2AhxC6}CfuGfcUfuCfaUfgC | 1609 | {Phosphate}asUfsgUfaGfAfaaggCfaUf | 1610 |
| | fCfUfUfucuacas{invAb} | | gaagcagsusu | |
| D-2241 | {GalNAc3K2AhxC6}[invAb]CfuGfcUfu | 1611 | {Phosphate}asUfsgUfaGfAfaaggCfaUf | 1612 |
| | CfaUfgCfCfUfUfucuacsasu | | gaagcagsusu | |
| D-2242 | {GalNAc3K2AhxC6}[invAb]cugcuucaU | 1613 | {Phosphate}asUfsgUfaGfAfaaggCfaUf | 1614 |
| | fgCf[dC]UfUfucuacsasu | | gaagcagsusu | |
| D-2243 | {GalNAc3K2AhxC6}cugcuucaUfgCfCfU | 1615 | {Phosphate}asUfsgUfaGfAfaaGfgCfaU | 1616 |
| | fUfucuacsasu | | fgaagcagsusu | |
| D-2244 | {GalNAc3K2AhxC6}[invAb]cugcuucaU | 1617 | {Phosphate}asUfsgUfaGfAfaaGfgCfaU | 1618 |
| | fgCfCfUfUfucuacsasu | | fgaagcagsusu | |
| D-2245 | {GalNAc3K2AhxC6}cugcuucaUfgCfcUf | 1619 | {Phosphate}asUfsgUfaGfAfaaggCfaUf | 1620 |
| | Ufucuacsasu | | gaagcagsusu | |
| D-2246 | {GalNAc3K2AhxC6}cugcuucaUfgCfcUf | 1621 | {Phosphate}asUfsgUfaGfAfaaggCfaUf | 1622 |
| | Ufucuacas{invAb} | | gaagcagsusu | |
| D-2247 | {GalNAc3K2AhxC6}[invAb]cugcuucaU | 1623 | {Phosphate}asUfsgUfaGfAfaaggCfaUf | 1624 |
| | fgCfcUfUfucuacsasu | | gaagcagsusu | |
| D-2248 | {GalNAc3K2AhxC6}cugcuucaUfgCfCfU | 1625 | {Phosphate}asUfsgUfagAfaaggCfaUfg | 1626 |
| | fUfucuacsasu | | aagcagsusu | |
| D-2249 | {GalNAc3K2AhxC6}cugcuucaUfgCfCfU | 1627 | {Phosphate}asUfsgUfagAfaaggCfaUfg | 1628 |
| | fUfucuacas{invAb} | | aagcagsusu | |
| D-2250 | {GalNAc3K2AhxC6}[invAb]cugcuucaU | 1629 | {Phosphate}asUfsgUfagAfaaggCfaUfg | 1630 |
| | fgCfCfUfUfucuacsasu | | aagcagsusu | |
| D-2251 | {GalNAc3K2AhxC6}cugcuucaUfgCfCfU | 1631 | {Phosphate}asUfsguagAfaaggCfaUfga | 1632 |
| | fUfucuacas{invAb} | | agcagsusu | |
| D-2252 | {GalNAc3K2AhxC6}[invAb]cugcuucaU | 1633 | {Phosphate}asUfsguagAfaaggCfaUfga | 1634 |
| | fgCfCfUfUfucuacsasu | | agcagsusu | |
| D-2253 | {GalNAc3K2AhxC6}[invAb]GfcUfuCfa | 1635 | {Phosphate}asUfsgUfagAfaaGfgCfaUf | 1636 |
| | UfgCfcUfUfucUfaCfaUfsusUf | | gAfaGfcsUfsu | |
| D-2254 | {GalNAc3K2AhxC6}[invAb]GfcUfuCfa | 1637 | {Phosphate}asUfsgUfagAfaaggCfaUfg | 1638 |
| | UfgCfCfUfUfucuacaususu | | AfaGfcsUfsu | |
| D-2255 | {GalNAc3K2AhxC6}[invAb]GfcUfuCfa | 1639 | {Phosphate}asUfsgUfagAfaaggCfaUfg | 1640 |
| | UfgCfCfUfUfucuacaususu | | aagcsusu | |
| D-2256 | {GalNAc3K2AhxC6}[invAb]gcuucaUfg | 1641 | {Phosphate}asUfsgUfagAfaaGfgCfaUf | 1642 |
| | CfCfUfUfucuacaususu | | gaagcsusu | |
| D-2257 | {GalNAc3K2AhxC6}[invAb]gcuucaUfg | 1643 | {Phosphate}asUfsgUfagAfaaGfgCfaUf | 1644 |
| | CfcUfUfucuacaususu | | gaagcsusu | |
| D-2258 | {GalNAc3K2AhxC6}cugcuucaUfgCfCfC | 1645 | {Phosphate}asUfsgUfaGfAfagggCfaUf | 1646 |
| | fUfucuacsasu | | gaagcagsusu | |
| D-2259 | {GalNAc3K2AhxC6}[invAb]gcuucaUfg | 1647 | {Phosphate}asUfsgUfaGfAJfagggCfaUf | 1648 |
| | CfCfCfUfucUfaCfaUfsusUf | | gaagcsusu | |
| D-2260 | {GalNAc3K2AhxC6}[invAb]GfcUfuCfa | 1649 | {Phosphate}asUfsgUfaGfAfagGfgCfaU | 1650 |
| | UfgCfcCfUfucUfaCfaUfsusUf | | fgAfaGfcsUfsu | |
| D-2261 | {GalNAc3K2AhxC6}[invAb]GfcUfuCfa | 1651 | {Phosphate}asUfsgUfaGfAfagggCfaUf | 1652 |
| | UfgCfCfCfUfucuacaususu | | gAfaGfcsUfsu | |
| D-2262 | {GalNAc3K2AhxC6}cugcuucaUfgCfCfC | 1653 | {Phosphate}asUfsgUfaGfAfagggCfaUf | 1654 |
| | fUfucuacas{invAb} | | gaagcagsusu | |
| D-2263 | {GalNAc3K2AhxC6}[invAb]cugcuucaU | 1655 | {Phosphate}asUfsgUfaGfAfagggCfaUf | 1656 |
| | fgCfCfCfUfucuacsasu | | gaagcagsusu | |
| D-2264 | {GalNAc3K2AhxC6}[invAb]GfcUfuCfa | 1657 | {Phosphate}asUfsgUfaGfAfagggCfaUf | 1658 |
| | UfgCfCfCfUfucuacaususu | | gaagcsusu | |
| D-2265 | {GalNAc3K2AhxC6}auguucCfuGfCfUfU | 1659 | {Phosphate}asGfsgCfaUfGfaagcAfgGf | 1660 |
| | fcaugccususu | | aacaususu | |
| D-2266 | {GalNAc3K2AhxC6}uguuccUfgCfUfUfC | 1661 | {Phosphate}asAfsgGfcAfUfgaagCfaGf | 1662 |
| | faugccuususu | | gaacasusu | |
| D-2267 | {GalNAc3K2AhxC6}ugccuuUfcUfAfCfA | 1663 | {Phosphate}asGfsgCfcAfCfuguaGfaAf | 1664 |
| | fguggccususu | | aggcasusu | |
| D-2268 | cguacuUfcGfUfCfCfuuguaugsusu | 1665 | {Phosphate}csAfsuAfcAfAfggacGfaAf | 1666 |
| | | | guacgsusu | |
| D-2269 | {GalNAc3K2AhxC6}[invAb]gcuucaUfg | 1667 | {Phosphate}asUfsgUfaGfAfagggCfaUf | 1668 |
| | Cf[dC]CfUfucuacaususu | | gaagcsusu | |
| D-2270 | {GalNAc3K2AhxC6}[invAb]gcuucaUfg | 1669 | {Phosphate}asUfsgUfaGfAfagGfgCfaU | 1670 |
| | CfCfCfUfucuacaususu | | fgaagcsusu | |
| D-2271 | {GalNAc3K2AhxC6}[invAb]gcuucaUfg | 1671 | {Phosphate}asUfsgUfaGfAfagggCfaUf | 1672 |
| | CfcCfUfucuacaususu | | gaagcsusu | |
| D-2272 | {GalNAc3K2AhxC6}[invAb]gcuucaUfg | 1673 | {Phosphate}asUfsgUfagAfagggCfaUfg | 1674 |
| | CfCfCfUfucuacaususu | | aagcsusu | |
| D-2273 | {GalNAc3K2AhxC6}[invAb]gcuucaUfg | 1675 | {Phosphate}asUfsguagAfagggCfaUfga | 1676 |
| | CfCfCfUfucuacaususu | | agcsusu | |
| D-2274 | {GalNAc3K2AhxC6}[invAb]GfcUfuCfa | 1677 | {Phosphate}asUfsgUfaGfAfagggCfaUf | 1678 |
| | UfgCfcCfUfucuacaususu | | gaagcsusu | |
| D-2275 | {sGalNAc3K2AhxC6}[invAb]ccugcuUf | 1679 | {Phosphate}usAfsgAfaAfGfgcauGfaAf | 1680 |
| | cAfUfGfCfcuUfuCfuAfsusUf | | gcaggsusu | |
| D-2276 | {sGalNAc3K2AhxC6}[invAb]CfcUfgCf | 1681 | {Phosphate}usAfsgAfaAfGfgcAfuGfaA | 1682 |
| | uUfcAfuGfCfcuUfuCfuAfsusUf | | fgCfaGfgsUfsu | |
| D-2277 | {sGalNAc3K2AhxC6}UfuCfcUfgCfuUfc | 1683 | {Phosphate}usAfsgAfaAfgGfCfauGfaA | 1684 |
| | AfUfgcCfuUfuCfus{invAb} | | fgCfaGfgAfasUfsu | |
| D-2278 | {sGalNAc3K2AhxC6}[invAb]CfcUfgCf | 1685 | {Phosphate}usAfsgAfaAfGfgcauGfaAf | 1686 |
| | uUfcAfUfGfCfcuuucuasusu | | gCfaGfgsUfsu | |
| D-2279 | {sGalNAc3K2AhxC6}UfuCfcUfgCfuUfC | 1687 | {Phosphate}usAfsgAfaAfgGfCfaugaAf | 1688 |
| | fAfUfgccuuucus{invAb} | | gCfaGfgAfasUfsu | |
| D-2280 | {sGalNAc3K2AhxC6}[invAb]augccuUf | 1689 | {Phosphate}asGfscCfaCfUfguagAfaAf | 1690 |
| | uCfUfAfCfaguggcususu | | ggcaususu | |
| D-2281 | {sGalNAc3K2AhxC6}[invAb]augccuUf | 1691 | {Phosphate}asGfscCfaCfUfguagAfaAf | 1692 |
| | uCfUfAfCfagUfgGfcUfsusUf | | ggcaususu | |
| D-2282 | {sGalNAc3K2AhxC6}[invAb]AfuGfcCf | 1693 | {Phosphate}asGfscCfaCfUfguAfgAfaA | 1694 |
| | uUfuCfuAfCfagUfgGfcUfsusUf | | fgGfcAfusUfsu | |
| D-2283 | {sGalNAc3K2AhxC6}UfcAfuGfcCfuUfu | 1695 | {Phosphate}asGfscCfaCfuGfUfagAfaA | 1696 |
| | CfUfacAfgUfgGfcs{invAb} | | fgGfcAfuGfasUfsu | |
| D-2284 | {sGalNAc3K2AhxC6}[invAb]AfuGfcCf | 1697 | {Phosphate}asGfscCfaCfUfguagAfaAf | 1698 |
| | uUfuCfUfAfCfaguggcususu | | gGfcAfusUfsu | |
| D-2285 | {sGalNAc3K2AhxC6}[invAb]UfcAfuGf | 1699 | {Phosphate}asGfscCfaCfuGfUfagaaAf | 1700 |
| | cCfuUfUfCfUfacaguggscsu | | gGfcAfuGfasUfsu | |
| D-2286 | {sGalNAc3K2AhxC6}[mvAb]ugcuucAf | 1701 | {Phosphate}asCfsuGfuAfgAfAfaggcAf | 1702 |
| | uGfCfCfUfuucuacasgsu | | uGfaagcasusu | |
| D-2287 | {sGalNAc3K2AhxC6}[invAb]cuucauGf | 1703 | {Phosphate}asCfsuGfuAfGfaaagGfcAf | 1704 |
| | cCfUfUfUfcuAfcAfgUfsusUf | | ugaagsusu | |
| D-2288 | {sGalNAc3K2AhxC6}UfgCfuUfcAfuGfc | 1705 | {Phosphate}asCfsuGfuAfgAfAfagGfcA | 1706 |
| | CfUfuuCfuAfcAfgs{invAb} | | fuGfaAfgCfasUfsu | |
| D-2289 | {sGalNAc3K2AhxC6}[invAb]CfuUfcAf | 1707 | {Phosphate}asCfsuGfuAfGfaaagGfcAf | 1708 |
| | uGfcCfUfUfUfcuacagususu | | uGfaAfgsUfsu | |
| D-2290 | {sGalNAc3K2AhxC6}UfgCfuUfcAfuGfC | 1709 | {Phosphate}asCfsuGfuAfgAfAfaggcAf | 1710 |
| | fCfUfuucuacags{invAb} | | uGfaAfgCfasUfsu | |
| D-2291 | {sGalNAc3K2AhxC6}[invAb]UfgCfuUf | 1711 | {Phosphate}asCfsuGfuAfgAfAfaggcAf | 1712 |
| | cAfuGfCfCfUfuucuacasgsu | | uGfaAfgCfasUfsu | |
| D-2292 | {sGalNAc3K2AhxC6}[invAb]ugcuucau | 1713 | {Phosphate}asCfsuGfuAfGfaaagGfcAf | 1714 |
| | GfcCfUfUfUfcuacasgsu | | ugaagcasusu | |
| D-2293 | {sGalNAc3K2AhxC6}[invAb]ugcuucau | 1715 | {Phosphate}asCfsuGfuAfGfaaagGfcAf | 1716 |
| | GfcCfUfUfUfcuAfcAfgsUf | | ugaagcasusu | |
| D-2294 | {sGalNAc3K2AhxC6}[invAb]UfgCfuUf | 1717 | {Phosphate}asCfsuGfuAfGfaaagGfcAf | 1718 |
| | cAfuGfcCfUfUfUfcuacasgsu | | uGfaAfgCfasUfsu | |
| D-2295 | {sGalNAc3K2AhxC6}[invAb]guuccuGf | 1719 | {Phosphate}asAfsaGfgCfAfugaaGfcAf | 1720 |
| | cUfUfCfAfugccuuususu | | ggaacsusu | |
| D-2296 | {sGalNAc3K2AhxC6}[invAb]ccugcuUf | 1721 | {Phosphate}usAfsgAfaAfGfgcauGfaAf | 1722 |
| | cAfUfGfCfcuuucuasusu | | gcaggsusu | |
| D-2297 | {sGalNAc3K2AhxC6}[invAb]cuucauGf | 1723 | {Phosphate}asCfsuGfuAfGfaaagGfcAf | 1724 |
| | cCfUfUfUfcuacagususu | | ugaagsusu | |
| D-2298 | {sGalNAc3K2AhxC6}[invAb]UfuCfcUf | 1725 | {Phosphate}usAfsgAfaAfGfgcAfuGfaA | 1726 |
| | gCfuUfcAfuGfCfcuUfuCfsusAf | | fgCfaGfgAfasUfsu | |
| D-2299 | {sGalNAc3K2AhxC6}uuccugCfuUfCfAf | 1727 | {Phosphate}usAfsgAfaAfgGfCfaugaAf | 1728 |
| | Ufgccuuucus{invAb} | | gCfaggaasusu | |
| D-2300 | {sGalNAc3K2AhxC6}[invAb]uuccugCf | 1729 | {Phosphate}usAfsgAfaAfgGfCfaugaAf | 1730 |
| | uUfCfAfUfgccuuucsusa | | gCfaggaasusu | |
| D-2301 | {sGalNAc3K2AhxC6}uuccugCfuUfCfAf | 1731 | {Phosphate}usAfsgAfaAfgGfCfaugaAf | 1732 |
| | UfgcCfuUfuCfus{invAb} | | gCfaggaasusu | |
| D-2302 | {sGalNAc3K2AhxC6}[invAb]uuccugCf | 1733 | {Phosphate}usAfsgAfaAfgGfCfaugaAf | 1734 |
| | uUfCfAfUfgcCfuUfuCfsusAf | | gCfaggaasusu | |
| D-2303 | {sGalNAc3K2AhxC6}[invAb]UfuCfcUf | 1735 | {Phosphate}usAfsgAfaAfgGfCfauGfaA | 1736 |
| | gCfuUfcAfUfgcCfuUfuCfsusAf | | fgCfaGfgAfasUfsu | |
| D-2304 | {sGalNAc3K2AhxC6}[invAb]UfuCfcUf | 1737 | {Phosphate}usAfsgAfaAfgGfCfaugaAf | 1738 |
| | gCfuUfCfAfUfgccuuucsusa | | gCfaGfgAfasUfsu | |
| D-2305 | {sGalNAc3K2AhxC6}[invAb]uuccugcu | 1739 | {Phosphate}usAfsgAfaAfGfgcauGfaAf | 1740 |
| | UfcAfUfGfCfcuuucsusa | | gcaggaasusu | |
| D-2306 | {sGalNAc3K2AhxC6}[invAb]uuccugcu | 1741 | {Phosphate}usAfsgAfaAfGfgcauGfaAf | 1742 |
| | UfcAfUfGfCfcuUfuCfusAf | | gcaggaasusu | |
| D-2307 | {sGalNAc3K2AhxC6}[invAb]UfuCfcUf | 1743 | {Phosphate}usAfsgAfaAfGfgcauGfaAf | 1744 |
| | gCfuUfcAfUfGfCfcuuucsusa | | gCfaGfgAfasUfsu | |
| D-2308 | {sGalNAc3K2AhxC6}[invAb]UfcAfuGf | 1745 | {Phosphate}asGfscCfaCfUfguAfgAfaA | 1746 |
| | cCfuUfuCfuAfCfagUfgGfscsUf | | fgGfcAfuGfasUfsu | |
| D-2309 | {sGalNAc3K2AhxC6}ucaugcCfuUfUfCf | 1747 | {Phosphate}asGfscCfaCfuGfUfagaaAf | 1748 |
| | Ufacaguggcs{invAb} | | gGfcaugasusu | |
| D-2310 | {sGalNAc3K2AhxC6}[invAb]ucaugcCf | 1749 | {Phosphate}asGfscCfaCfuGfUfagaaAf | 1750 |
| | uUfUfCfUfacaguggscsu | | gGfcaugasusu | |
| D-2311 | {sGalNAc3K2AhxC6}ucaugcCfuUfUfCf | 1751 | {Phosphate}asGfscCfaCfuGfUfagaaAf | 1752 |
| | UfacAfgUfgGfcs{invAb} | | gGfcaugasusu | |
| D-2312 | {sGalNAc3K2AhxC6}[invAb]ucaugcCf | 1753 | {Phosphate}asGfscCfaCfuGfUfagaaAf | 1754 |
| | uUfUfCfUfacAfgUfgGfscsUf | | gGfcaugasusu | |
| D-2313 | {sGalNAc3K2AhxC6}[invAb]UfcAfuGf | 1755 | {Phosphate}asGfscCfaCfuGfUfagAfaA | 1756 |
| | cCfuUfuCfUfacAfgUfgGfscsUf | | fgGfcAfuGfasUfsu | |
| D-2314 | {sGalNAc3K2AhxC6}UfcAfuGfcCfuUfU | 1757 | {Phosphate}asGfscCfaCfuGfUfagaaAf | 1758 |
| | fCfUfacaguggcs{invAb} | | gGfcAfuGfasUfsu | |
| D-2315 | {sGalNAc3K2AhxC6}[invAb]ucaugccu | 1759 | {Phosphate}asGfscCfaCfUfguagAfaAf | 1760 |
| | UfuCfUfAfCfaguggscsu | | ggcaugasusu | |
| D-2316 | {sGalNAc3K2AhxC6}[invAb]ucaugccu | 1761 | {Phosphate}asGfscCfaCfUfguagAfaAf | 1762 |
| | UfuCfUfAfCfagUfgGfcsUf | | ggcaugasusu | |
| D-2317 | {sGalNAc3K2AhxC6}[mvAb]UfcAfuGf | 1763 | {Phosphate}asGfscCfaCfUfguagAfaAf | 1764 |
| | cCfuUfuCfUfAfCfaguggscsu | | gGfcAfuGfasUfsu | |
| D-2318 | {sGalNAc3K2AhxC6}[invAb]UfgCfuUf | 1765 | {Phosphate}asCfsuGfuAfGfaaAfgGfcA | 1766 |
| | cAfuGfcCfuUfUfcuAfcAfsgsUf | | fuGfaAfgCfasUfsu | |
| D-2319 | {sGalNAc3K2AhxC6}ugcuucAfuGfCfCf | 1767 | {Phosphate}asCfsuGfuAfgAfAfaggcAf | 1768 |
| | Ufuucuacags{invAb} | | uGfaagcasusu | |
| D-2320 | {sGalNAc3K2AhxC6}ugcuucAfuGfCfCf | 1769 | {Phosphate}asCfsuGfuAfgAfAfaggcAf | 1770 |
| | UfuuCfuAfcAfgs{invAb} | | uGfaagcasusu | |
| D-2321 | {sGalNAc3K2AhxC6}[invAb]ugcuucAf | 1771 | {Phosphate}asCfsuGfuAfgAfAfaggcAf | 1772 |
| | uGfCfCfUfuuCfuAfcAfsgsUf | | uGfaagcasusu | |
| D-2322 | {sGalNAc3K2AhxC6}[invAb]CfuUfcAf | 1773 | {Phosphate}asCfsuGfuAfGfaaAfgGfcA | 1774 |
| | uGfcCfuUfUfcuAfcAfgUfsusUf | | fuGfaAfgsUfsu | |
| D-2323 | {sGalNAc3K2AhxC6}[invAb]UfgCfuUf | 1775 | {Phosphate}asCfsuGfuAfgAfAfagGfcA | 1776 |
| | cAfuGfcCfUfuuCfuAfcAfsgsUf | | fuGfaAfgCfasUfsu | |
| D-2324 | {sGalNAc3K2AhxC6}[invAb]gcuucaUf | 1777 | {Phosphate}asUfsgUfaGfAfaaggCfaUf | 1778 |
| | gCfCfUfUfucuacaususu | | gaagcsusu | |
| D-2325 | {sGalNAc3K2AhxC6}[invAb]caugccUf | 1779 | {Phosphate}asCfscAfcUfGfuagaAfaGf | 1780 |
| | uUfCfUfAfcaguggususu | | gcaugsusu | |
| D-2326 | {sGalNAc3K2AhxC6}[invAb]cugcuuCf | 1781 | {Phosphate}usUfsaGfaAfAfggcaUfgAf | 1782 |
| | aUfGfCfCfuuucuaasusu | | agcagsusu | |
| D-2327 | {sGalNAc3K2AhxC6}[invAb]gcuucaUf | 1783 | {Phosphate}usUfsgUfaGfAfaaggCfaUf | 1784 |
| | gCfCfUfUfucuacaasusu | | gaagcsusu | |
| D-2328 | {sGalNAc3K2AhxC6}[invAb]uucaugCf | 1785 | {Phosphate}usAfscUfgUfAfgaaaGfgCf | 1786 |
| | cUfUfUfCfuacaguasusu | | augaasusu | |
| D-2329 | {sGalNAc3K2AhxC6}[invAb]guuccuGf | 1787 | {Phosphate}asAfsaGfgCfAfugaaGfcAf | 1788 |
| | cUfUfCfAfugCfcUfuUfsusUf | | ggaacsusu | |
| D-2330 | {sGalNAc3K2AhxC6}auguucCfuGfCfUf | 1789 | {Phosphate}asAfsaGfgCfaUfGfaagcAf | 1790 |
| | UfcaUfgCfcUfus{invAb} | | gGfaacaususu | |
| D-2331 | {sGalNAc3K2AhxC6}[invAb]auguucCf | 1791 | {Phosphate}asAfsaGfgCfaUfGfaagcAf | 1792 |
| | uGfCfUfUfcaUfgCfcUfsusUf | | gGfaacaususu | |
| D-2332 | {sGalNAc3K2AhxC6}[invAb]GfuUfcCf | 1793 | {Phosphate}asAfsaGfgCfAfugAfaGfcA | 1794 |
| | uGfcUfuCfAfugCfcUfuUfsusUf | | fgGfaAfcsUfsu | |
| D-2333 | {sGalNAc3K2AhxC6}AfuGfuUfcCfuGfc | 1795 | {Phosphate}asAfsaGfgCfaUfGfaaGfcA | 1796 |
| | UfUfcaUfgCfcUfus{invAb} | | fgGfaAfcAfusUfsu | |
| D-2334 | {sGalNAc3K2AhxC6}[invAb]AfuGfuUf | 1797 | {Phosphate}asAfsaGfgCfaUfGfaaGfcA | 1798 |
| | cCfuGfcUfUfcaUfgCfcUfsusUf | | fgGfaAfcAfusUfsu | |
| D-2335 | {sGalNAc3K2AhxC6}[invAb]GfuUfcCf | 1799 | {Phosphate}asAfsaGfgCfAfugaaGfcAf | 1800 |
| | uGfcUfUfCfAfugccuuususu | | gGfaAfcsUfsu | |
| D-2336 | {sGalNAc3K2AhxC6}AfuGfuUfcCfuGfC | 1801 | {Phosphate}asAfsaGfgCfaUfGfaagcAf | 1802 |
| | fUfUfcaugccuus{invAb} | | gGfaAfcAfusUfsu | |
| D-2337 | {sGalNAc3K2AhxC6}[invAb]AfuGfuUf | 1803 | {Phosphate}asAfsaGfgCfaUfGfaagcAf | 1804 |
| | cCfuGfCfUfUfcaugccususu | | gGfaAfcAfusUfsu | |
| D-2338 | {sGalNAc3K2AhxC6}[invAb]auguuccu | 1805 | {Phosphate}asAfsaGfgCfAfugaaGfcAf | 1806 |
| | GfcUfUfCfAfugccususu | | ggaacaususu | |
| D-2339 | {sGalNAc3K2AhxC6}[invAb]auguuccu | 1807 | {Phosphate}asAfsaGfgCfAfugaaGfcAf | 1808 |
| | GfcUfUfCfAfugCfcUfusUf | | ggaacaususu | |
| D-2340 | {sGalNAc3K2AhxC6}[invAb]GfcUfuCf | 1809 | {Phosphate}usAfscUfgUfAfgaAfaGfgC | 1810 |
| | aUfgCfcUfuUfCfuaCfaGfsusAf | | faUfgAfaGfcsUfsu | |
| D-2341 | {sGalNAc3K2AhxC6}[invAb]gcuucaUf | 1811 | {Phosphate}usAfscUfgUfaGfAfaaggCf | 1812 |
| | gCfCfUfUfucuacagsusa | | aUfgaagcsusu | |
| D-2342 | {sGalNAc3K2AhxC6}[invAb]uucaugCf | 1813 | {Phosphate}usAfscUfgUfAfgaaaGfgCf | 1814 |
| | cUfUfUfCfuaCfaGfuAfsusUf | | augaasusu | |
| D-2343 | {sGalNAc3K2AhxC6}[invAb]gcuucaUf | 1815 | {Phosphate}usAfscUfgUfaGfAfaaggCf | 1816 |
| | gCfCfUfUfucUfaCfaGfsusAf | | aUfgaagcsusu | |
| D-2344 | {sGalNAc3K2AhxC6}GfcUfuCfaUfgCfC | 1817 | {Phosphate}usAfscUfgUfaGfAfaaggCf | 1818 |
| | fUfUfucuacagus{invAb} | | aUfgAfaGfcsUfsu | |
| D-2345 | {sGalNAc3K2AhxC6}[invAb]GfcGfgCf | 1819 | {Phosphate}usAfsgAfaGfCfccagGfaAf | 1820 |
| | uUfcCfUfGfGfgcuucuasusu | | gCfcGfcsUfsu | |
| D-2346 | {sGalNAc3K2AhxC6}[invAb]auggcuUf | 1821 | {Phosphate}asGfsgCfaUfAfucugGfaAf | 1822 |
| | cCfAfGfAfuaugccususu | | gccaususu | |
| D-2347 | {sGalNAc3K2AhxC6}[invAb]acauggCf | 1823 | {Phosphate}asGfsgCfaUfaUfCfuggaAf | 1824 |
| | uUfCfCfAfgaUfaUfgCfscsUf | | gCfcaugususu | |
| D-2348 | {sGalNAc3K2AhxC6}[invAb]AfcAfuGf | 1825 | {Phosphate}asGfsgCfaUfAfucugGfaAf | 1826 |
| | gCfuUfcCfAfGfAfuaugcscsu | | gCfcAfuGfusUfsu | |
| D-2349 | {sGalNAc3K2AhxC6}[invAb]caacguAf | 1827 | {Phosphate}asCfsaUfcAfaUfGfaaggGf | 1828 |
| | cCfCfUfUfcauugausgsu | | uAfcguugsusu | |
| D-2350 | {sGalNAc3K2AhxC6}[invAb]caacguac | 1829 | {Phosphate}asCfsaUfcAfAfugaaGfgGf | 1830 |
| | CfcUfUfCfAfuuGfaUfgsUf | | uacguugsusu | |
| D-2351 | {sGalNAc3K2AhxC6}[invAb]acguacCf | 1831 | {Phosphate}asCfsaUfcAfAfugaaGfgGf | 1832 |
| | cUfUfCfAfuugaugususu | | uacgususu | |
| D-2352 | {sGalNAc3K2AhxC6}cugcuucaUfgCfCf | 1833 | {Phosphate}asUfsgUfaGfAfaaggCfaUf | 1834 |
| | UfUfucuacas{invAb} | | gaagcagsusu | |
| D-2353 | {sGalNAc3K2AhxC6}[invAb]cugcuuca | 1835 | {Phosphate}asUfsgUfaGfAfaaggCfaUf | 1836 |
| | UfgCfCfUfUfucuacsasu | | gaagcagsusu | |
| D-2354 | {sGalNAc3K2AhxC6}[invAb]gcuucaUf | 1837 | {Phosphate}asUfsgUfaGfAfaaggCfaUf | 1838 |
| | gCfCfUfUfucUfaCfaUfsusUf | | gaagcsusu | |
| D-2355 | {sGalNAc3K2AhxC6}cugcuucaUfgCfCf | 1839 | {Phosphate}asUfsgUfaGfAfaaggCfaUf | 1840 |
| | UfUfucUfaCfas{invAb} | | gaagcagsusu | |
| D-2356 | {sGalNAc3K2AhxC6}[invAb]cugcuuca | 1841 | {Phosphate}asUfsgUfaGfAfaaggCfaUf | 1842 |
| | UfgCfCfUfUfucUfaCfasUf | | gaagcagsusu | |
| D-2357 | {sGalNAc3K2AhxC6}cugcuucaUfgCfCf | 1843 | {Phosphate}asUfsguagAfaaggCfaUfga | 1844 |
| | UfUfucuacas{invAb} | | agcagsusu | |
| D-2358 | {sGalNAc3K2AhxC6}[mvAb]cugcuuca | 1845 | {Phosphate}asUfsgUfaGfAfaaggCfaUf | 1846 |
| | UfgCfCfUfUfucuacas{invAb} | | gaagcagsusu | |
| D-2359 | {sGalNAc3K2AhxC6}[invAb]gcuucaUf | 1847 | {Phosphate}asUfsgUfaGfAfaaGfgCfaU | 1848 |
| | gCfCfUfUfucuacaususu | | fgaagcsusu | |
| D-2360 | {sGalNAc3K2AhxC6}[invAb]CfuUfcAf | 1849 | {Phosphate}asCfsuGfuAfGfaaagGfcAf | 1850 |
| | uGfcCfUfUfUfcuacagususu | | ugaagsusu | |
| D-2361 | {sGalNAc3K2AhxC6}ugcuucauGfcCfUf | 1851 | {Phosphate}asCfsuGfuAfGfaaagGfcAf | 1852 |
| | UfUfcuacags{invAb} | | ugaagcasusu | |
| D-2362 | {sGalNAc3K2AhxC6}[invAb]cugcuuca | 1853 | {Phosphate}asUfsgUfaGfAfaaGfgCfaU | 1854 |
| | UfgCfCfUfUfucuacsasu | | fgaagcagsusu | |
| D-2363 | {sGalNAc3K2AhxC6}cugcuucaUfgCfcU | 1855 | {Phosphate}asUfsgUfaGfAfaaggcaUfg | 1856 |
| | fUfucuacas{invAb} | | aagcagsusu | |
| D-2364 | {sGalNAc3K2AhxC6}cugcuucaUfgCfCf | 1857 | {Phosphate}asUfsgUfaGfAfaaGfgCfaU | 1858 |
| | UfUfucuacas{invAb} | | fgaagcagsusu | |
| D-2365 | {sGalNAc3K2AhxC6}[invAb]cuucauCf | 1859 | {Phosphate}asCfsuGfuAfGfaaagGfgAf | 1860 |
| | cCfUfUfUfcuacagususu | | ugaagsusu | |
| D-2366 | {sGalNAc3K2AhxC6}[invAb]gcuucaUf | 1861 | {Phosphate}asUfsgUfaGfAfaaggGfaUf | 1862 |
| | cCfCfUfUfucuacaususu | | gaagcsusu | |
| D-2367 | {sGalNAc3K2AhxC6}ugcuucauCfcCfUf | 1863 | {Phosphate}asCfsuGfuAfGfaaagGfgAf | 1864 |
| | UfUfcuacags{invAb} | | ugaagcasusu | |
| D-2368 | {sGalNAc3K2AhxC6}cugcuucaUfcCfCf | 1865 | {Phosphate}asUfsgUfaGfAfaaggGfaUf | 1866 |
| | UfUfucuacas{invAb} | | gaagcagsusu | |
| D-2369 | {sGalNAc3K2AhxC6}[invAb]acauugCf | 1867 | {Phosphate}usCfsaGfgUfGfaaagAfgCf | 1868 |
| | uCfUfUfUfcaccugasusu | | aaugususu | |
| D-2370 | {sGalNAc3K2AhxC6}cugcuucaUfgCfCf | 1869 | asUfsgUfaGfAfaaggCfaUfgaagcagsusu | 1870 |
| | UfUfucuacas{invAb} | | | |
| D-2371 | {sGalNAc3K2AhxC6}cugcuucaUfgCfCf | 1871 | asUfsgUfaGfAfaaggCfaUfgaagcasgsus | 1872 |
| | UfUfucuacas{invAb} | | u | |
| D-2372 | {sGalNAc3K2AhxC6}cugcuucaUfgCfCf | 1873 | asUfsgsUfaGfAfaaggCfaUfgaagcagsus | 1874 |
| | UfUfucuacas{invAb} | | u | |
| D-2373 | {sGalNAc3K2AhxC6}cugcuucaUfgCfCf | 1875 | asUfsgUfaGfAfaaggCfaUfgaagcagusu | 1876 |
| | UfUfucuacas{invAb} | | | |
| D-2374 | {sGalNAc3K2AhxC6}cugcuucaUfgCfCf | 1877 | asUfsgsUfaGfAfaaggCfaUfgaagcagusu | 1878 |
| | UfUfucuacas{invAb} | | | |
| D-2375 | {sGalNAc3K2AhxC6}cugcuucaUfgCfCf | 1879 | asUfgUfaGfAfaaggCfaUfgaagcagsusu | 1880 |
| | UfUfucuacas{invAb} | | | |
| D-2376 | {sGalNAc3K2AhxC6}cugcuucaUfgCfCf | 1881 | asUfgUfaGfAfaaggCfaUfgaagcasgsusu | 1882 |
| | UfUfucuacas{invAb} | | | |
| D-2377 | {sGalNAc3K2AhxC6}cugcuucaUfgCfCf | 1883 | asUfsgUfaGfAfaaggCfaUfgaagcagsusu | 1884 |
| | UfUfucuacsas{invAb} | | | |
| D-2378 | {sGalNAc3K2AhxC6}cugcuucaUfgCfCf | 1885 | asUfsgUfaGfAfaaggCfaUfgaagcagsusu | 1886 |
| | UfUfucuascsas{invAb} | | | |
| D-2379 | {sGalNAc3K2AhxC6}csugcuucaUfgCfC | 1887 | asUfsgUfaGfAfaaggCfaUfgaagcagsusu | 1888 |
| | fUfUfucuacas{invAb} | | | |
| D-2380 | {sGalNAc3K2AhxC6}csusgcuucaUfgCf | 1889 | asUfsgUfaGfAfaaggCfaUfgaagcagsusu | 1890 |
| | CfUfUfucuacas{invAb} | | | |
| D-2381 | {sGalNAc3K2AhxC6}[invAb]cuucauGf | 1891 | {Phosphate}asCfsuGfuAfGfaaagGfcAf | 1892 |
| | cCf[dT]UfUfcuacagususu | | ugaagsusu | |
| D-2382 | {sGalNAc3K2AhxC6}[invAb]cuucauGf | 1893 | {Phosphate}asCfsuGfuAfGfaaAfgGfcA | 1894 |
| | cCfUfUfUfcuacagususu | | fugaagsusu | |
| D-2383 | {sGalNAc3K2AhxC6}[invAb]cuucauGf | 1895 | {Phosphate}asCfsuGfuAfGfaaagGfcAf | 1896 |
| | cCfuUfUfcuacagususu | | ugaagsusu | |
| D-2384 | {sGalNAc3K2AhxC6}[invAb]cuucauGf | 1897 | {Phosphate}asCfsuGfuaGfaaagGfcAfu | 1898 |
| | cCfUfUfUfcuacagususu | | gaagsusu | |
| D-2385 | {sGalNAc3K2AhxC6}[invAb]cuucauGf | 1899 | [Phosphate}asCfsuguaGfaaagGfcAfug | 1900 |
| | cCfUfUfUfcuacagususu | | aagsusu | |
| D-2386 | {sGalNAc3K2AhxC6}[invAb]cuucauGf | 1901 | {Phosphate}asCfsuGfuAfGfaaagGfcAf | 1902 |
| | c[dC]UfUfUfcuacagususu | | ugaagsusu | |
| D-2387 | {sGalNAc3K2AhxC6}[invAb]cuucauGf | 1903 | {Phosphate}asCfsuGfuAfGfaaagGfcAf | 1904 |
| | cCfUf[dT]Ufcuacagususu | | ugaagsusu | |
| D-2388 | {sGalNAc3K2AhxC6}[invAb]gcuucaUf | 1905 | {Phosphate}asUfsgUfaGfAfauccCfaUf | 1906 |
| | gGfGfAfUfucuacaususu | | gaagcsusu | |
| D-2389 | {sGalNAc3K2AhxC6}[invAb]cuucauGf | 1907 | {Phosphate}asCfsuGfuAfGfauucGfcAf | 1908 |
| | cGfAfAfUfcuacagususu | | ugaagsusu | |
| D-2390 | {sGalNAc3K2AhxC6}cugcuucaUfgCfCf | 1909 | {Phosphate}usUfsgUfaGfAfaaggCfaUf | 1910 |
| | UfUfucuacas{invAb} | | gaagcagsusu | |
| D-2391 | {sGalNAc3K2AhxC6}[mvAb]cugcuuca | 1911 | {Phosphate}usUfsgUfaGfAfaaggCfaUf | 1912 |
| | UfgCfCfUfUfucuacsasa | | gaagcagsusu | |
| D-2392 | {sGalNAc3K2AhxC6}cugcuucaUfgCfCf | 1913 | {Phosphate}usUfsgUfaGfAfaaggCfaUf | 1914 |
| | UfUfucuacas{invDA} | | gaagcagsusu | |
| D-2393 | {sGalNAc3K2AhxC6}cugcuucaUfgGfGf | 1915 | {Phosphate}asUfsgUfaGfAfauccCfaUf | 1916 |
| | AfUfucuacas{invAb} | | gaagcagsusu | |
| D-2394 | {sGalNAc3K2AhxC6}[invAb]cugcuuca | 1917 | {Phosphate}asUfsgUfaGfAfauccCfaUf | 1918 |
| | UfgGfGfAfUfucuacsasu | | gaagcagsusu | |
| D-2395 | {sGalNAc3K2AhxC6}[invAb]CfuUfcAf | 1919 | {Phosphate}asCfsuGfuAfGfaaagGfcAf | 1920 |
| | uGfcCfUfUfUfcuAfcAfgUfsusUf | | ugaagsusu | |
| D-2396 | {sGalNAc3K2AhxC6}[invAb]cuucauGf | 1921 | {Phosphate}asCfsuGfuAfGfaaagGfcAf | 1922 |
| | cCfUfUfUfcuAfcAfgUfsusUf | | uGfaAfgsUfsu | |
| D-2397 | {sGalNAc3K2AhxC6}[invAb]gcuucaUf | 1923 | asUfsgUfaGfAfaaggCfaUfgaagcsusu | 1924 |
| | gCfCfUfUfucuacaususu | | | |
| D-2398 | {sGalNAc3K2AhxC6}[invAb]ugcuucau | 1925 | asCfsuGfuAfGfaaagGfcAfugaagcasusu | 1926 |
| | GfcCfUfUfUfcuacags{invAb} | | | |
| D-2399 | {sGalNAc3K2AhxC6}[invAb]cuucauGf | 1927 | {Phosphate}asCfsuGfuAfGfaaagGfcAf | 1928 |
| | cCfUfUfUfcuacagususu | | uGfaAfgsUfsu | |
| D-2400 | {sGalNAc3K2AhxC6}ugcuucauGfcCfUf | 1929 | asCfsuGfuAfGfaaagGfcAfugaagcasusu | 1930 |
| | UfUfcuAfcAfgs{invAb} | | | |
| D-2401 | {sGalNAc3K2AhxC6}ugcuucauGfcCfUf | 1931 | asCfsuGfuAfGfaaAfgGfcAfugaagcasus | 1932 |
| | UfUfcuacags{invAb} | | u | |
| D-2402 | {sGalNAc3K2AhxC6}ugcuucauGfcCfUf | 1933 | asCfsuguaGfaaagGfcAfugaagcasusu | 1934 |
| | UfUfcuacags{invAb} | | | |
| D-2403 | {sGalNAc3K2AhxC6}[invAb]cuucauGf | 1935 | asCfsuGfuAfGfaaagGfcAfugaagsusu | 1936 |
| | cCfUfUfUfcuacagususu | | | |
| D-2404 | {sGalNAc3K2AhxC6}ugcuucauGfcCfUf | 1937 | asCfsuGfuAfGfaaagGfcAfugaagcasusu | 1938 |
| | UfUfcuacags{invAb} | | | |
| D-2405 | {GalNAc3K2AhxC6}augccuuuCfuAfCfA | 1939 | {Phosphate}asGfscCfaCfUfguAfgAfaA | 1940 |
| | fGfuggcusus{invAb} | | fgGfcAfuGfasUfsu | |
| D-2406 | {sGalNAc3K2AhxC6}ucaugccuUfuCfUf | 1941 | asGfscCfaCfUfguagAfaAfggcaugasusu | 1942 |
| | AfCfaguggcs{invAb} | | | |
| D-2407 | {sGalNAc3K2AhxC6}[invAb]augccuUf | 1943 | asGfscCfaCfUfguagAf aAfggcaususu | 1944 |
| | uCfUfAfCfaguggcususu | | | |
| D-2408 | {sGalNAc3K2AhxC6}[invAb]augccuUf | 1945 | asGfscCfaCfUfguagAfaAfggcaususu | 1946 |
| | uCfUfAfCfagUfgGfcUfsusUf | | | |
| D-2409 | {sGalNAc3K2AhxC6}[invAb]ucaugccu | 1947 | asGfscCfaCfUfguagAfaAfggcaugasusu | 1948 |
| | UfuCfUfAfCfaguggscsu | | | |
| D-2410 | {sGalNAc3K2AhxC6}ucaugccuUfuCfUf | 1949 | asGfscCfaCfUfguagAfaAfggcaugasusu | 1950 |
| | AfCfagUfgGfcs{invAb} | | | |
| D-2411 | {sGalNAc3K2AhxC6}[invAb]augccuUf | 1951 | asGfscCfaCfUfguAfgAfaAfggcaususu | 1952 |
| | uCfUfAfCfaguggcususu | | | |
| D-2412 | {sGalNAc3K2AhxC6}ucaugccuUfuCfUf | 1953 | asGfscCfaCfUfguAfgAfaAfggcaugasus | 1954 |
| | AfCfaguggcs{invAb} | | u | |
| D-2413 | {sGalNAc3K2AhxC6}ucaugccuUfuCfUf | 1955 | asGfsccacUfguagAfaAfggcaugasusu | 1956 |
| | AfCfaguggcs{invAb} | | | |
| D-2414 | {sGalNAc3K2AhxC6}[invAb]ucaugcuu | 1957 | asGfscCfaCfUfguagAfaAfggcaugasusu | 1958 |
| | UfuCfUfAfCfaguggcs{invAb} | | | |
| D-2415 | {sGalNAc3K2AhxC6}[invAb]augccuUf | 1959 | usGfscCfaCfUfguagAfaAfggcaususu | 1960 |
| | uCfUfAfCfaguggcasusu | | | |
| D-2416 | {sGalNAc3K2AhxC6}ucaugccuUfuCfUf | 1961 | usGfscCfaCfUfguagAfaAfggcaugasusu | 1962 |
| | AfCfaguggcs{invAb} | | | |
| D-2417 | {sGalNAc3K2AhxC6}[invAb]ucaugccu | 1963 | usGfscCfaCfUfguagAfaAfggcaugasusu | 1964 |
| | UfuCfUfAfCfaguggscsa | | | |
| D-2418 | {sGalNAc3K2AhxC6}ucaugccuUfuCfUf | 1965 | usGfscCfaCfUfguagAfaAfggcaugasusu | 1966 |
| | AfCfaguggcs{invDA} | | | |
| D-2419 | {sGalNAc3K2AhxC6}cugcuucaUfgCfCf | 1967 | asUfsguagAfaaggCfaUfgaagcagsusu | 1968 |
| | UfUfucuacas{invAb} | | | |
| D-2420 | {sGalNAc3K2AhxC6}cugcuucaUfgCfCf | 1969 | usUfsguagAfaaggCfaUfgaagcagsusu | 1970 |
| | UfUfucuacas{invAb} | | | |
| D-2421 | {sGalNAc3K2AhxC6}cugcuucaUfgCfCf | 1971 | usUfsguagAfaaggCfaUfgaagcagsusu | 1972 |
| | UfUfucuacas{invDA} | | | |
| D-2422 | {sGalNAc3K2AhxC6}ucaugccuUfuCfUf | 1973 | usGfsccacUfguagAfaAfggcaugasusu | 1974 |
| | AfCfaguggcs{invAb} | | | |
| D-2423 | {sGalNAc3K2AhxC6}ucaugccuUfuCfUf | 1975 | usGfsccacUfguagAfaAfggcaugasusu | 1976 |
| | AfCfaguggcs{invDA} | | | |
| D-2424 | {sGalNAc3K2AhxC6}[invAb]cuucauGf | 1977 | {Phosphate}asCfsuGfuAfGfaaAfgGfcA | 1978 |
| | cCfuUfUfcuacagususu | | fugaagsusu | |
| D-2425 | {sGalNAc3K2AhxC6}cugcuucaUfgCfCf | 1979 | asUfsgUfa[Ab]AfaaggCfaUfgaagcagsu | 1980 |
| | UfUfucuacas{invAb} | | su | |
| D-2426 | {sGalNAc3K2AhxC6}cugcuucaUfgCfCf | 1981 | asUfsgua[Ab]AfaaggCfaUfgaagcagsus | 1982 |
| | UfUfucuacas{invAb} | | u | |
| D-2427 | {sGalNAc3K2AhxC6}ugcuucauGfcCfUf | 1983 | asCfsuGfu[Ab]GfaaagGfcAfugaagcasu | 1984 |
| | UfUfcuacags{invAb} | | su | |
| D-2428 | {sGalNAc3K2AhxC6}ugcuucauGfcCfUf | 1985 | asCfsugu[Ab]GfaaagGfcAfugaagcasus | 1986 |
| | UfUfcuacags{invAb} | | u | |
| D-2429 | {sGalNAc3K2AhxC6}ucaugccuUfuCfUf | 1987 | asGfscCfa[Ab]UfguagAfaAfggcaugasu | 1988 |
| | AfCfaguggcs{invAb} | | su | |
| D-2430 | {sGalNAc3K2AhxC6}ucaugccuUfuCfUf | 1989 | asGfscca[Ab]UfguagAfaAfggcaugasus | 1990 |
| | AfCfaguggcs{invAb} | | u | |
| D-2431 | {sGalNAc3K2AhxC6}cugcuucaUfgCfCf | 1991 | asUfs[GNA- | 1992 |
| | UfUfucuacas{invAb} | | G]uagAfaaggCfaUfgaagcagsusu | |
| D-2432 | {sGalNAc3K2AhxC6}cugcuucaUfgCfCf | 1993 | asUfsg[GKA- | 1994 |
| | UfUfucuacas{invAb} | | U]agAfaaggCfaUfgaagcagsusu | |
| D-2433 | {sGalNAc3K2AhxC6}cugcuucaUfgCfCf | 1995 | asUfsgu[GNA- | 1996 |
| | UfUfucuacas{invAb} | | A]gAfaaggCfaUfgaagcagsusu | |
| D-2434 | {sGalNAc3K2AhxC6}cugcuucaUfgCfCf | 1997 | asUfsgua[GNA- | 1998 |
| | UfUfucuacas{invAb} | | G]AfaaggCfaUfgaagcagsusu | |
| D-2435 | {sGalNAc3K2AhxC6}cugcuucaUfgCfCf | 1999 | asUfsguag[GNA- | 2000 |
| | UfUfucuacas{invAb} | | A]aaggCfaUfgaagcagsusu | |
| D-2436 | {sGalNAc3K2AhxC6}cugcuucaUfgCfCf | 2001 | asUfsguagAf[GNA- | 2002 |
| | UfUfucuacas{invAb} | | A]aggCfaUfgaagcagsusu | |
| D-2437 | {sGalNAc3K2AhxC6}cugcuucaUfgCfCf | 2003 | asUfsgUfagAfaaggCfaUfgaagcagsusu | 2004 |
| | UfUfucuacas{invAb} | | | |
| D-2438 | {sGalNAc3K2AhxC6}[invAb]cugcuuca | 2005 | asUfsguagAfaaggCfaUfgaagcagsusu | 2006 |
| | UfgCfCfUfUfucuacsasu | | | |
| D-2439 | {sGalNAc3K2AhxC6}[invAb]cugcuuca | 2007 | asUfsguagAfaaggCfaUfgaagcagsusu | 2008 |
| | UfgCfCfUfUfucuacas{invAb} | | | |
| D-2440 | {sGalNAc3K2AhxC6}cugcuucaUfgCfCf | 2009 | asUfsguagAfaaGfgCfaUfgaagcagsusu | 2010 |
| | UfUfucuacas{invAb} | | | |
| D-2441 | {sGalNAc3K2AhxC6}cugcuucaUfgCfCf | 2011 | asUfsguagAfaaggCfaUfgaagcagsusu | 2012 |
| | UfUfucUfaCfas{invAb} | | | |
| D-2442 | {sGalNAc3K2AhxC6}[invAb]cugcuuca | 2013 | asUfsguagAfaaggCfaUfgaagcagsusu | 2014 |
| | UfgCfCfUfUfucUfaCfasUf | | | |
| D-2443 | {sGalNAc3K2AhxC6}cugcuucaUfgCfCf | 2015 | asUfsguagAfaaGfgCfaUfgaagcagsusu | 2016 |
| | UfUfucUfaCfas{invAb} | | | |
| D-2444 | {sGalNAc3K2AhxC6}cugcuucaUfgCfCf | 2017 | asUfsgUfaGfAfaaGfgCfaUfgaagcagsus | 2018 |
| | UfUfucuacas{invAb} | | u | |
| D-2445 | {sGalNAc3K2AhxC6}[invAb]cugcuuca | 2019 | asUfsgUfaGfAfaaGfgCfaUfgaagcagsus | 2020 |
| | UfgCfCfUfUfucuacsasu | | u | |
| D-2446 | {sGalNAc3K2AhxC6}[invAb]cugcuuca | 2021 | asUfsgUfaGfAfaaggCfaUfgaagcagsusu | 2022 |
| | UfgCfCfUfUfucuacas{invAb} | | | |
| D-2447 | {sGalNAc3K2AhxC6}cugcuucaUfgCfCf | 2023 | as[Ab]guagAfaaggCfaUfgaagcagsusu | 2024 |
| | UfUfucuacas{invAb} | | | |
| D-2448 | {sGalNAc3K2AhxC6}cugcuucaUfgCfCf | 2025 | asUfs[Ab]uagAfaaggCfaUfgaagcagsus | 2026 |
| | UfUfucuacas{invAb} | | u | |
| D-2449 | {sGalNAc3K2AhxC6}cugcuucaUfgCfCf | 2027 | asUfsg[Ab]agAfaaggCfaUfgaagcagsus | 2028 |
| | UfUfucuacas{invAb} | | u | |
| D-2450 | {sGalNAc3K2AhxC6}cugcuucaUfgCfCf | 2029 | asUfsgu[Ab]gAfaaggCfaUfgaagcagsus | 2030 |
| | UfUfucuacas{invAb} | | u | |
| D-2451 | {sGalNAc3K2AhxC6}cugcuucaUfgCfCf | 2031 | asUfsguag[Ab]aaggCfaUfgaagcagsusu | 2032 |
| | UfUfucuacas{invAb} | | | |
| D-2452 | {sGalNAc3K2AhxC6}cugcuucaUfgCfCf | 2033 | asUfsguagAf[Ab]aggCfaUfgaagcagsus | 2034 |
| | UfUfucuacas{invAb} | | u | |
| D-2453 | {sGalNAc3K2AhxC6}caacguacCfcUfUf | 2035 | asCfsaucaAfugaaGfgGfuacguugsusu | 2036 |
| | CfAfuugaugs{invAb} | | | |
| D-2454 | {sGalNAc3K2AhxC6}caacgacCfcUfUf | 2037 | asCfsaUfcAfAfugaaGfgGfuacguugsusu | 2038 |
| | CfAfuugaugs{invAb} | | | |
| D-2455 | {sGalNAc3K2AhxC6}acauggcuUfcCfAf | 2039 | asGfsgcauAfucugGfaAfgccaugususu | 2040 |
| | GfAfuaugccs{invAb} | | | |
| D-2456 | {sGalNAc3K2AhxC6}acauggcuUfcCfAf | 2041 | asGfsgCfaUfAfucugGfaAfgccaugususu | 2042 |
| | GfAfuaugccs{invAb} | | | |
| D-2457 | {sGalNAc3K2AhxC6}cugcuucaUfgCfCf | 2043 | asUfsguaGfAfaaggCfaUfgaagcagsusu | 2044 |
| | UfUfucuacas{invAb} | | | |
| D-2458 | {sGalNAc3K2AhxC6}cugcuucaUfgCfCf | 2045 | asUfsguagAfaaggCfaUfgaagcagsusu | 2046 |
| | UfUfucUfacas{invAb} | | | |
| D-2459 | {sGalNAc3K2AhxC6}cugcuucaUfgCfCf | 2047 | asUfsguagAfaaggCfaUfgaagcagsusu | 2048 |
| | UfUfucuaCfas{invAb} | | | |
| D-2460 | {sGalNAc3K2AhxC6}cugcggcuUfcCfUf | 2049 | usAfsgAfaGfCfccagGfaAfgccgcagsusu | 2050 |
| | GfGfgcuucus{invAb} | | | |
| D-2461 | {sGalNAc3K2AhxC6}cugcggcuUfcCfUf | 2051 | usAfsgaagCfccagGfaAfgccgcagsusu | 2052 |
| | GfGfgcuucus{invAb} | | | |
| D-2462 | {sGalNAc3K2AhxC6}ugcuucauGfcCfUf | 2053 | asCfsuGfuaGfaaagGfcAfugaagcasusu | 2054 |
| | UfUfcuacags{invAb} | | | |
| D-2463 | {sGalNAc3K2AhxC6}[invAb]ugcuucau | 2055 | asCfsuGfuaGfaaagGfcAfugaagcasusu | 2056 |
| | GfcCfUfUfUfcuacasgsu | | | |
| D-2464 | {sGalNAc3K2AhxC6}[invAb]ugcuucau | 2057 | asCfsuGfuaGfaaagGfcAfugaagcasusu | 2058 |
| | GfcCfUfUfUfcuacags{invAb} | | | |
| D-2465 | {sGalNAc3K2AhxC6}ugcuucauGfcCfUf | 2059 | asCfsuGfuaGfaaAfgGfcAfugaagcasusu | 2060 |
| | UfUfcuacags{invAb} | | | |
| D-2466 | {sGalNAc3K2AhxC6}ugcuucauGfcCfUf | 2061 | asCfsuGfuaGfaaagGfcAfugaagcasusu | 2062 |
| | UfUfcuAfcAfgs{invAb} | | | |
| D-2467 | {sGalNAc3K2AhxC6}ugcuucauGfcCfUf | 2063 | asCfsuGfuAfGfaaagGfcAfuGfaAfgCfas | 2064 |
| | UfUfcuAfcAfgs{invAb} | | Ufsu | |
| D-2468 | {sGalNAc3K2AhxC6}cugcuuCfaUfGfCf | 2065 | asUfsguaGfaaAfggcaUfgAfagcagsusu | 2066 |
| | cuuucuacsasu | | | |
| D-2469 | {sGalNAc3K2AhxC6}cugcuuCfaUfGfCf | 2067 | asUfsguaGfaaaggcaUfgAfagcagsusu | 2068 |
| | cuuucuacsasu | | | |
| D-2470 | {sGalNAc3K2AhxC6}cugcuuCfaUfGfCf | 2069 | asUfsguaGfaAfAfggcaUfgAfagcagsusu | 2070 |
| | cuuucuacsasu | | | |
| D-2471 | {sGalNAc3K2AhxC6}ugcuucauGfcCfUf | 2071 | usCfsuguaGfaaagGfcAfugaagcasusu | 2072 |
| | UfUfcuacags{invAb} | | | |
| D-2472 | {sGalNAc3K2AhxC6}ugcuucauGfcCfUf | 2073 | usCfsuguaGfaaagGfcAfugaagcasusu | 2074 |
| | UfUfcuacags{invAb} | | | |
| D-2473 | {sGalNAc3K2AhxC6}cugcuucaUfgCfCf | 2075 | asUfsguagAfaaggCfaUfgaagcagsusu | 2076 |
| | UfUfucuacas{invDT} | | | |
| D-2474 | {sGalNAc3K2AhxC6}cugcuucaUfgCfCf | 2077 | asUfsguagAf[sGNA- | 2078 |
| | UfUfucuacas{invAb} | | A]aggCfaUfgaagcagsusu | |
| D-2475 | {sGalNAc3K2AhxC6}cugcuucaUfgCfCf | 2079 | asUfsguagAfs[GNA- | 2080 |
| | UfUfucuacas{invAb} | | A]aggCfaUfgaagcagsusu | |
| D-2476 | {sGalNAc3K2AhxC6}cugcuucaUfgCfCf | 2081 | asUfsguagAfs[sGNA- | 2082 |
| | UfUfucuacas{invAb} | | A]aggCfaUfgaagcagsusu | |
| D-2477 | csusgcuucaUfgCfCfUfUfucuac | 2083 | asUfsguagAf[GNA- | 2084 |
| | as{invAb} | | A]aggCfaUfgaagcagsusu | |
| D-2478 | csusgcuucaUfgCfCfUfUfucuac | 2085 | asUfsguagAf[GNA- | 2086 |
| | as{invAb} | | A]AfggCfaUfgaagcagsusu | |
| D-2479 | csusgcuucaUfgCfCfUfUfucuac | 2087 | asUfsguaga[GNA- | 2088 |
| | as{invAb} | | A]aggCfaUfgaagcagsusu | |
| D-2480 | csusgcuucaUfgCfCfUfuucuac | 2089 | asUfsguagAf[GNA- | 2090 |
| | as{invAb} | | A]aggCfaUfgaagcagsusu | |
| D-2481 | csusgcuucaUfgCfCfUfuucuac | 2091 | asUfsguaga[GNA- | 2092 |
| | as{invAb} | | A]aggCfaUfgaagcagsusu | |
| D-2482 | csusgcuucaUfgCfCfUfUfucuac | 2093 | asUfsguaga[GNA- | 2094 |
| | as{invAb} | | A]AfggCfaUfgaagcagsusu | |
| D-2483 | csusgcuucaUfgCfCfUfuucuac | 2095 | asUfsguagAf[GNA- | 2096 |
| | as{invAb} | | A]AfggCfaUfgaagcagsusu | |
| D-2484 | csusgcuucaUfgCfCfUfuucuac | 2097 | asUfsguaga[GNA- | 2098 |
| | as{invAb} | | A]AfggCfaUfgaagcagsusu | |
| D-2485 | csusgcuucaUfgCfCfUfUfucuac | 2099 | asUfsgUfaGfAf[GNA- | 2100 |
| | as{invAb} | | A]aggCfaUfgaagcagsusu | |
| D-2486 | csusgcuucaUfgCfCfUfUfucuac | 2101 | asUfsgUfagAf[GNA- | 2102 |
| | as{invAb} | | A]aGfgCfaUfgaagcagsusu | |
| D-2487 | csusgcuucaUfgCfCfUfUfucuac | 2103 | asUfsgUfagAf[GNA- | 2104 |
| | as{invAb} | | A]aggCfaUfgaagcagsusu | |
| D-2488 | csusgcuucaUfgCfCfUfUfucuac | 2105 | asUfsgUfaGfAf[GNA- | 2106 |
| | as{invAb} | | A]aGfgCfaUfgaagcagsusu | |
| D-2489 | csusgcuucaUfgCfCfUfUfucuac | 2107 | asUfsguagAf[GNA- | 2108 |
| | as{invAb} | | A]aGfgCfaUfgaagcagsusu | |
| D-2490 | csusgcuucaUfgCfCfUfUfucUfaCf | 2109 | asUfsguagAf[GNA- | 2110 |
| | as{invAb} | | A]aGfgCfaUfgaagcagsusu | |
| D-2491 | csusgcuucaUfgCfCfUfUfucuac | 2111 | asUfsguagAf[GNA- | 2112 |
| | as{invAb} | | A]a[dG]gCfaUfgaagcagsusu | |
| D-2492 | csusgcuucaUfgCfCfUfUfucuac | 2113 | asUfsguagAf[GNA- | 2114 |
| | as{invAb} | | A][dA]ggCfaUfgaagcagsusu | |
| D-2493 | csusgcuucaUfgCfCfUfUfucuacas{invAb} | 2115 | asUfsguagAf[GNA- | 2116 |
| | | | A]ag[dG]CfaUfgaagcagsusu | |
| D-2494 | csusgcuucaUfgCfCfUfUfucuacas{invAb} | 2117 | asUfsguaGfAf[GNA- | 2118 |
| | | | A]aggCfaUfgaagcagsusu | |
| D-2495 | csusgcuucaUfgCfCfUfUfucuacas{invAb} | 2119 | asUfsguaGfa[GNA- | 2120 |
| | | | A]aggCfaUfgaagcagsusu | |
| D-2496 | csusgcuucaUfgCfCfUfUfucuacas{invAb} | 2121 | asUfsguaGfa[GNA- | 2122 |
| | | | A]AfggCfaUfgaagcagsusu | |
| D-2497 | csusgcuuCfaUfGfCfcuuucuacas{invAb} | 2123 | asUfsguaGfa[GNA- | 2124 |
| | | | A]aggcaUfgAfagcagsusu | |
| D-2498 | csusgcuuCfaUfGfCfcuuucuacas{invAb} | 2125 | asUfsguaGfa[GNA- | 2126 |
| | | | A]AfggcaUfgAfagcagsusu | |
| D-2499 | csusgcuuCfaUfgCfcuuucuacas{invAb} | 2127 | asUfsguaga[GNA- | 2128 |
| | | | A]aggCfaUfgAfagcagsusu | |
| D-2500 | csusgcuuCfaUfgCfcuuucuacas{invAb} | 2129 | asUfsguagaaaggCfaUfgAfagcagsusu | 2130 |
| D-2501 | usgscuucauGfcCfUfUfUfcuacags{invDA} | 2131 | us[sGNA- | 2132 |
| | | | C]uguaGfaaagGfcAfugaagcasusu | |
| D-2502 | usgscuucauGfcCfUfUfUfcuacags{invDA} | 2133 | usCfs[GNA- | 2134 |
| | | | U]guaGfaaagGfcAfugaagcasusu | |
| D-2503 | usgscuucauGfcCfUfUfUfcuacags{invDA} | 2135 | usCfsug[GNA- | 2136 |
| | | | U]aGfaaagGfcAfugaagcasusu | |
| D-2504 | usgscuucauGfcCfUfUfUfcuacags{invDA} | 2137 | usCfsugu[GNA- | 2138 |
| | | | A]GfaaagGfcAfugaagcasusu | |
| D-2505 | usgscuucauGfcCfUfUfUfcuacags{invDA} | 2139 | usCfsuguaGf[GNA- | 2140 |
| | | | A]aagGfcAfugaagcasusu | |
| D-2506 | usgscuucauGfcCfUfUfUfcuacags{invDA} | 2141 | us[Ab]uguaGfaaagGfcAfugaagcasusu | 2142 |
| D-2507 | usgscuucauGfcCfUfUfUfcuacags{invDA} | 2143 | usCfs[Ab]guaGfaaagGfcAfugaagcasus | 2144 |
| | | | u | |
| D-2508 | usgscuucauGfcCfUfUfUfcuacags{invDA} | 2145 | usCfsu[Ab]uaGfaaagGfcAfugaagcasus | 2146 |
| | | | u | |
| D-2509 | usgscuucauGfcCfUfUfUfcuacags{invDA} | 2147 | usCfsug[Ab]aGfaaagGfcAfugaagcasus | 2148 |
| | | | u | |
| D-2510 | usgscuucauGfcCfUfUfUfcuacags{invDA} | 2149 | usCfsugu[Ab]GfaaagGfcAfugaagcasus | 2150 |
| | | | u | |
| D-2511 | usgscuucauGfcCfUfUfUfcuacags{invDA} | 2151 | usCfsugua[Ab]aaagGfcAfugaagcasusu | 2152 |
| D-2512 | usgscuucauGfcCfUfUfUfcuacags{invDA} | 2153 | usCfsuguaGf[Ab]aagGfcAfugaagcasus | 2154 |
| | | | u | |
| D-2513 | uscsaugccuUfuCfUfAfCfaguggcs{invDT} | 2155 | asGfsccacUfguagAfaAfggcaugasusu | 2156 |
| D-2514 | uscsaugccuUfuCfUfAfCfaguggcs{invAb} | 2157 | usGfsccacUfguagAfaAfggcaugasusu | 2158 |
| D-2515 | uscsaugccuUfuCfUfAfCfaguggcs{invDA} | 2159 | usGfsccacUfguagAfaAfggcaugasusu | 2160 |
| D-2516 | uscscugcuuCfaUfGfCfCfuuucuas{invDT} | 2161 | asUfsagaaAfggcaUfgAfagcaggasusu | 2162 |
| D-2517 | uscscugcuuCfaUfGfCfCfuuucuas{invAb} | 2163 | usUfsagaaAfggcaUfgAfagcaggasusu | 2164 |
| D-2518 | uscscugcuuCfaUfGfCfCfuuucuas{invDA} | 2165 | usUfsagaaAfggcaUfgAfagcaggasusu | 2166 |
| D-2519 | usasuguuccUfgCfUfUfCfaugccus{invDT} | 2167 | asAfsggcaUfgaagCfaGfgaacauasusu | 2168 |
| D-2520 | usasuguuccUfgCfUfUfCfaugccus{invAb} | 2169 | usAfsggcaUfgaagCfaGfgaacauasusu | 2170 |
| D-2521 | usasuguuccUfgCfUfUfCfaugccus{invDA} | 2171 | usAfsggcaUfgaagCfaGfgaacauasusu | 2172 |
| D-2522 | {sGalNAc3K2AhxC6}uccugcuuCfaUfGf | 2173 | asUfsagaaAfggcaUfgAfagcaggasusu | 2174 |
| | CfCfuuucuas{invAb} | | | |
| D-2523 | {sGalNAc3K2AhxC6}uauguuccUfgCfUf | 2175 | asAfsggcaUfgaagCfaGfgaacauasusu | 2176 |
| | UfCfaugccus{invAb} | | | |
| D-2524 | {sGalNAc3K2AhxC6}ucaugccuUfuCfUf | 2177 | asGfsccacUfguagAfaAfggcaugasusu | 2178 |
| | AfCfaguggcs{invDT} | | | |
| D-2525 | {sGalNAc3K2AhxC6}uccugcuuCfaUfGf | 2179 | asUfsagaaAfggcaUfgAfagcaggasusu | 2180 |
| | CfCfuuucuas{invDT} | | | |
| D-2526 | {sGalNAc3K2AhxC6}uccugcuuCfaUfGf | 2181 | usUfsagaaAfggcaUfgAfagcaggasusu | 2182 |
| | CfCfuuucuas{invDA} | | | |
| D-2527 | {sGalNAc3K2AhxC6}uauguuccUfgCfUf | 2183 | usAfsggcaUfgaagCfaGfgaacauasusu | 2184 |
| | UfCfaugccus{invDA} | | | |
| D-2528 | usgscuucauGfcCfUfUfUfcuacags{invDA} | 2185 | usCfsugua[GNA- | 2186 |
| | | | G]aaagGfcAfugaagcasusu | |
| D-2529 | cugcuucaUfgCfCfUfUfsucuacas{invAb} | 2187 | asUfsguagAf[GNA- | 2188 |
| | | | A]aggCfaUfgaagcagsusu | |
| D-2530 | cugcuucaUfgCfCfUfsUfucuacas{invAb} | 2189 | asUfsguagAf[GNA- | 2190 |
| | | | A]aggCfaUfgaagcagsusu | |
| D-2531 | cugcuucaUfgCfCfUfsUfsucuacas{invAb} | 2191 | asUfsguagAf[GNA- | 2192 |
| | | | A]aggCfaUfgaagcagsusu | |
| D-2532 | cugcuucaUfgCfCfUfsUfucuacas{invAb} | 2193 | asUfsguagAfs[GNA- | 2194 |
| | | | A]aggCfaUfgaagcagsusu | |
| D-2533 | cugcuucaUfgCfCfUfsUfsucuacas{invAb} | 2195 | asUfsguagAfs[GNA- | 2196 |
| | | | A]aggCfaUfgaagcagsusu | |
| D-2534 | cugcuucaUfgefefUfUfsucuacas{invAb} | 2197 | asUfsguagAf[sGNA- | 2198 |
| | | | A]aggCfaUfgaagcagsusu | |
| D-2535 | cugcuucaUfgCfCfUfsUfsucuacas{invAb} | 2199 | asUfsguagAf[sGNA- | 2200 |
| | | | A]aggCfaUfgaagcagsusu | |
| D-2536 | cugcuucaUfgCfCfUfUfsucuacas{invAb} | 2201 | asUfsguagAfs[sGNA- | 2202 |
| | | | A]aggCfaUfgaagcagsusu | |
| D-2537 | cugcuucaUfgCfCfUfsUfucuacas{invAb} | 2203 | asUfsguagAfs[sGNA- | 2204 |
| | | | A]aggCfaUfgaagcagsusu | |
| D-2538 | cugcuucaUfgCfCfUf[LNA- | 2205 | asUfsguagAf[GNA- | 2206 |
| | T]ucuacas{invAb} | | A]aggCfaUfgaagcagsusu | |
| D-2539 | cugcuucaUfgCfCf[LNA- | 2207 | asUfsguagAf[GNA- | 2208 |
| | T]Ufucuacas{invAb} | | A]aggCfaUfgaagcagsusu | |
| D-2540 | cugcuucaUfgCfCfUfUf[LNA- | 2209 | asUfsguagAf[GNA- | 2210 |
| | T]cuacas{invAb} | | A]aggCfaUfgaagcagsusu | |
| D-2541 | cugcuucaUfgCfCfUfUfuc[LNA- | 2211 | asUfsgu[GNA- | 2212 |
| | T]acas{invAb} | | A]gAfaaggCfaUfgaagcagsusu | |
| D-2542 | cugcuucaUfgCfCfUfUfucu[LNA- | 2213 | asUfsg[GNA- | 2214 |
| | A]cas{invAb} | | U]agAfaaggCfaUfgaagcagsusu | |
| D-2543 | cugcuucaUfgCfCfUfUfucuac[sLNA- | 2215 | as[sGNA- | 2216 |
| | A]{invAb} | | U]guagAfaaggCfaUfgaagcagsusu | |
| D-2544 | cugcuucaUfgCfCfUfUf[LNA- | 2217 | asUfsguag[Ab]aaggCfaUfgaagcagsusu | 2218 |
| | T]cuacas{invAb} | | | |
| D-2545 | cugcuucaUfgCfCfUfUfuc[LNA- | 2219 | asUfsgu[Ab]gAfaaggCfaUfgaagcagsus | 2220 |
| | T]acas{invAb} | | u | |
| D-2546 | cugcuucaUfgCfCfUfUfucu[LNA- | 2221 | asUfsg[Ab]agAfaaggCfaUfgaagcagsus | 2222 |
| | A]cas{invAb} | | u | |
| D-2547 | cugcuucaUfgCfCfUfUfucUfaCf | 2223 | asUfsgUfagAf[GNA- | 2224 |
| | as{invAb} | | A]aggCfaUfgaagcagsusu | |
| D-2548 | cugcuucaUfgCfCfUfUfucUfaCf | 2225 | asUfsguagAf[GNA- | 2226 |
| | as{invAb} | | A]aggCfaUfgaagcagsusu | |
| D-2549 | cugcuucaUfgCfCfUfs[LNA- | 2227 | asUfsguagAf[GNA- | 2228 |
| | T]ucuacas{invAb} | | A]aggCfaUfgaagcagsusu | |
| D-2550 | cugcuucaUfgCfCfUfs[sLNA- | 2229 | asUfsguagAf[GNA- | 2230 |
| | T]ucuacas{invAb} | | A]aggCfaUfgaagcagsusu | |
| D-2551 | cugcuucaUfgCfCfUf[LNA- | 2231 | asUfsguagAf[sGNA- | 2232 |
| | T]ucuacas{invAb} | | A]aggCfaUfgaagcagsusu | |
| D-2552 | cugcuucaUfgCfCfUf[LNA- | 2233 | asUfsguagAfs[GNA- | 2234 |
| | T]ucuacas{invAb} | | A]aggCfaUfgaagcagsusu | |
| D-2553 | usgscuucauGfcCfUfUfUfau[LNA- | 2235 | usCfsug[Ab]aGfaaagGfcAfugaagcasus | 2236 |
| | A]cags{invDA} | | u | |
| D-2554 | usgscuucauGfcCfUfUfUfc[LNA- | 2237 | usCfsugu[Ab]GfaaagGfcAfugaagcasus | 2238 |
| | T]acags{invDA} | | u | |
| D-2555 | usgscuucauGfcCfUfUf[LNA- | 2239 | usCfsuguaGf[Ab]aagGfcAfugaagcasus | 2240 |
| | T]cuacags{invDA} | | u | |
| D-2556 | usgscuucauGfcCfUfUfUfcuac[LNA- | 2241 | usCfs[GNA- | 2242 |
| | A]gs{invDA} | | U]guaGfaaagGfcAfugaagcasusu | |
| D-2557 | usgscuucauGfcCfUfUfUfau[LNA- | 2243 | usCfsug[GNA- | 2244 |
| | A]cags{invDA} | | U]aGfaaagGfcAfugaagcasusu | |
| D-2558 | usgscuucauGfcCfUfUfUfc[LNA- | 2245 | usCfsugu[GNA- | 2246 |
| | T]acags{invDA} | | A]GfaaagGfcAfugaagcasusu | |
| D-2559 | usgscuucauGfcCfUfUfUfcuaca[sLNA- | 2247 | us[Ab]uguaGfaaagGfcAfugaagcasusu | 2248 |
| | G]{invDA} | | | |
| D-2560 | usgscuucauGfcCfUfUfUfcuac[LNA- | 2249 | usCfs[Ab]guaGfaaagGfcAfugaagcasus | 2250 |
| | A]gs{invDA} | | u | |
| D-2561 | ucaugccuUfuCfUfAfCfa[LNA- | 2251 | asGfscca[Ab]UfguagAfaAfggcaugasus | 2252 |
| | G]uggcs{invAb} | | u | |
| D-2562 | ucaugccuUfuCfUfAfCfag[LNA- | 2253 | asGfscca[Ab]UfguagAfaAfggcaugasus | 2254 |
| | T]ggcs{invAb} | | u | |
| D-2563 | ucaugccuUfuCfUfAfCfasgsugg | 2255 | asGfscca[Ab]UfguagAfaAfggcaugasus | 2256 |
| | cs{invAb} | | u | |
| D-2564 | {GalNAc3K2AhxC6}GfgUfaUfgUfuCfCf | 2349 | {Phosphate}asAfsuGfaAfGfcaggAfaCf | 2350 |
| | UfGfcuUfcAfuUfsusUf | | aUfaCfcsUfsu | |
| D-2565 | {GalNAc3K21thxC6}GfgUfaUfgUfuCf | 2351 | {Phosphate}usAfsuGfaAfGfcaggAfaCf | 2352 |
| | CfUfGfcuUfcAfuAfsusUf | | aUfaCfcsUfsu | |
| D-2566 | {GalNAc3K2AhxC6}GfuAfuGfuUfcCfUf | 2353 | {Phosphate}asCfsaUfgAfAfgcagGfaAf | 2354 |
| | GfCfuuCfaUfgUfsusUf | | cAfuAfcsUfsu | |
| D-2567 | {GalNAc3K2AhxC6}UfaUfgUfuCfcUfGf | 2355 | {Phosphate}usGfscAfuGfAfagcaGfgAf | 2356 |
| | CfUfucAfuGfcAfsusUf | | aCfaUfasUfsu | |
| D-2568 | {GalNAc3K2AhxC6}AfuGfuUfcCfuGfCf | 2357 | {Phosphate}asGfsgCfaUfGfaagcAfgGf | 2358 |
| | UfUfcaUfgCfcUfsusUf | | aAfcAfusUfsu | |
| D-2569 | {GalNAc3K2AhxC6}UfgUfuCfcUfgCfUf | 2359 | {Phosphate}asAfsgGfcAfUfgaagCfaGf | 2360 |
| | UfCfauGfcCfuUfsusUf | | gAfaCfasUfsu | |
| D-2570 | {GalNAc3K2AhxC6}GfuUfcCfuGfaUfUf | 2361 | {Phosphate}asAfsaGfgCfAfugaaGfcAf | 2362 |
| | CfAfugCfcUfuUfsusUf | | gGfaAfcsUfsu | |
| D-2571 | {GalNAc3K2AhxC6}UfuCfcUfgCfuUfCf | 2363 | {Phosphate}asAfsaAfgGfCfaugaAfgCf | 2364 |
| | AfUfgcCfuUfuUfsusUf | | aGfgAfasUfsu | |
| D-2572 | {GalNAc3K2AhxC6}UfuCfcUfgCfuUfCf | 2365 | {Phosphate}usAfsaAfgGfCfaugaAfgCf | 2366 |
| | AfUfgcCfuUfuAfsusUf | | aGfgAfasUfsu | |
| D-2573 | {GalNAc3K2AhxC6}UfcCfuGfaUfuCfAf | 2367 | {Phosphate}asGfsaAfaGfGfcaugAfaGf | 2368 |
| | UfGfccUfuUfcUfsusUf | | cAfgGfasUfsu | |
| D-2574 | {GalNAc3K2AhxC6}CfcUfgCfuUfcAfUf | 2369 | {Phosphate}usAfsgAfaAfGfgcauGfaAf | 2370 |
| | GfCfcuUfuCfuAfsusUf | | gCfaGfgsUfsu | |
| D-2575 | {GalNAc3K2AhxC6}CfuGfcUfuCfaUfGf | 2371 | {Phosphate}asUfsaGfaAfAfggcaUfgAf | 2372 |
| | CfCfuuUfcUfaUfsusUf | | aGfcAfgsUfsu | |
| D-2576 | {GalNAc3K2AhxC6}CfuGfcUfuCfaUfGf | 2373 | {Phosphate}usUfsaGfaAfAfggcaUfgAf | 2374 |
| | CfCfuuUfcUfaAfsusUf | | aGfcAfgsUfsu | |
| D-2577 | {GalNAc3K2AhxC6}UfgCfuUfcAfuGfCf | 2375 | {Phosphate}usGfsuAfgAfAfaggcAfuGf | 2376 |
| | CfUfuuCfuAfcAfsusUf | | aAfgCfasUfsu | |
| D-2578 | {GalNAc3K2AhxC6}GfcUfuCfaUfgCfCf | 2377 | {Phosphate}asUfsgUfaGfAfaaggCfaUf | 2378 |
| | UfUfucUfaCfaUfsusUf | | gAfaGfcsUfsu | |
| D-2579 | {GalNAc3K2AhxC6}GfcUfuCfaUfgCfCf | 2379 | {Phosphate}usUfsgUfaGfAfaaggCfaUf | 2380 |
| | UfUfucUfaCfaAfsusUf | | gAfaGfcsUfsu | |
| D-2580 | {GalNAc3K2AhxC6}CfuUfcAfuGfcCfUf | 2381 | {Phosphate}asCfsuGfuAfGfaaagGfcAf | 2382 |
| | UfUfcuAfcAfgUfsusUf | | uGfaAfgsUfsu | |
| D-2581 | {GalNAc3K2AhxC6}UfuCfaUfgCfcUfUf | 2383 | {Phosphate}asAfscUfgUfAfgaaaGfgCf | 2384 |
| | UfCfuaCfaGfuUfsusUf | | aUfgAfasUfsu | |
| D-2582 | {GalNAc3K2AhxC6}UfuCfaUfgCfcUfUf | 2385 | {Phosphate}usAfscUfgUfAfgaaaGfgCf | 2386 |
| | UfCfuaCfaGfuAfsusUf | | aUfgAfasUfsu | |
| D-2583 | {GalNAc3K2AhxC6}UfcAfuGfcCfutifUf | 2387 | {Phosphate}asCfsaCfuGfGfagaaAfgGf | 2388 |
| | cfUfacAfgUfgUfsusUf | | cAfuGfasUfsu | |
| D-2584 | {GalNAc3K2AhxC6}UfcAfuGfcCfuUfUf | 2389 | {Phosphate}usCfsaCfuGfUfagaaAfgGf | 2390 |
| | CfUfacAfgUfgAfsusUf | | cAfuGfasUfsu | |
| D-2585 | {GalNAc3K2AhxC6}CfaUfgCfcUfuUfCf | 2391 | {Phosphate}asCfscAfcUfGfuagaAfaGf | 2392 |
| | UfAfcaGfuGfgUfsusUf | | gCfaUfgsUfsu | |
| D-2586 | {GalNAc3K2AhxC6}CfaUfgCfcUfuUfCf | 2393 | {Phosphate}usCfscAfcUfGfuagaAfaGf | 2394 |
| | UfAfcaGfuGfgAfsusUf | | gCfaUfgsUfsu | |
| D-2587 | {GalNAc3K2AhxC6}AfuGfcCfuUfuCfUf | 2395 | {Phosphate}asGfscCfaCfUfguagAfaAf | 2396 |
| | AfCfagUfgGfcUfsusUf | | gGfcAfusUfsu | |
| D-2588 | {GalNAc3K2AhxC6}AfuGfcCfuUfuCfUf | 2397 | {Phosphate}usGfscCfaCfUfguagAfaAf | 2398 |
| | AfCfagUfgGfcAfsusUf | | gGfcAfusUfsu | |
| D-2589 | {GalNAc3K2AhxC6}UfgCfcUfuUfcUfAf | 2399 | {Phosphate}asGfsgCfcAfCfuguaGfaAf | 2400 |
| | CfAfguGfgCfcUfsusUf | | aGfgCfasUfsu | |
| D-2590 | {GalNAc3K2AhxC6}GfcCfuUfuCfuAfCf | 2401 | {Phosphate}asAfsgGfcCfAfcuguAfgAf | 2402 |
| | AfGfugGfcCfuUfsusUf | | aAfgGfcsUfsu | |
| D-2591 | {GalNAc3K2AhxC6}GfgUfaUfgUfuCfCf | 2403 | {Phosphate}gsAfsuGfaAfGfcaggAfaCf | 2404 |
| | UfGfcuUfcAfuCfsusUf | | aUfaCfcsUfsu | |
| D-2592 | {GalNAc3K2AhxC6}GfuAfuGfuUfcCfUf | 2405 | {Phosphate}gsGfsaUfgAfAfgcagGfaAf | 2406 |
| | GfCfuuCfaUfcCfsusUf | | cAfuAfcsUfsu | |
| D-2593 | {GalNAc3K2AhxC6}UfaUfgUfuCfcUfGf | 2407 | [Phosphate}gsGfsgAfuGfAfagcaGfgAf | 2408 |
| | CfUfucAfuCfcCfsusUf | | aCfaUfasUfsu | |
| D-2594 | {GalNAc3K2AhxC6}AfuGfuUfcCfuGfCf | 2409 | {Phosphate}gsGfsgGfaUfGfaagcAfgGf | 2410 |
| | UfUfcaUfcCfcCfsusUf | | aAfcAfusUfsu | |
| D-2595 | {GalNAc3K2AhxC6}UfgUfuCfcUfgCfUf | 2411 | {Phosphate}asGfsgGfgAfUfgaagCfaGf | 2412 |
| | UfCfauCfcCfcUfsusUf | | gAfaCfasUfsu | |
| D-2596 | {GalNAc3K2AhxC6}GfuUfcCfuGfcUfUf | 2413 | {Phosphate}asAfsgGfgGfAfugaaGfcAf | 2414 |
| | CfAfucCfcCfuUfsusUf | | gGfaAfcsUfsu | |
| D-2597 | {GalNAc3K2AhxC6}UfuCfcUfgCfuUfCf | 2415 | {Phosphate}gsAfsaGfgGfGfaugaAfgCf | 2416 |
| | AfUfccCfcUfuCfsusUf | | aGfgAfasUfsu | |
| D-2598 | {GalNAc3K2AhxC6}UfcCfuGfcUfuCfAf | 2417 | {Phosphate}asGfsaAfgGfGfgaugAfaGf | 2418 |
| | ufCfccCfuUfcUfsusUf | | cAfgGfasUfsu | |
| D-2599 | {GalNAc3K2AhxC6}CfcUfgCfuUfcAfUf | 2419 | {Phosphate}usAfsgAfaGfGfggauGfaAf | 2420 |
| | cfCfccUfuefuAfsusUf | | gCfaGfgsUfsu | |
| D-2600 | {GalNAc3K2AhxC6}CfuGfcUfuCfaUfCf | 2421 | {Phosphate}gsUfsaGfaAfGfgggaUfgAf | 2422 |
| | CfCfcuUfcUfaCfsusUf | | aGfcAfgsUfsu | |
| D-2601 | {GalNAc3K2AhxC6}UfgCfuUfcAfuCfCf | 2423 | {Phosphate}usGfsuAfgAfAfggggAfuGf | 2424 |
| | CfCfuuCfuAfcAfsusUf | | aAfgCfasUfsu | |
| D-2602 | {GalNAc3K2AhxC6}GfcUfuCfaUfcCfCf | 2425 | {Phosphate}csUfsgUfaGfAfagggGfaUf | 2426 |
| | CfUfucUfaCfaGfsusUf | | gAfaGfcsUfsu | |
| D-2603 | {GalNAc3K2AhxC6}CfuUfcAfuCfcCfCf | 2427 | {Phosphate}asCfsuGfuAfGfaaggGfgAf | 2428 |
| | UfUfcuAfcAfgUfsusUf | | uGfaAfgsUfsu | |
| D-2604 | {GalNAc3K2AhxC6}UfuCfaUfcCfcCfUf | 2429 | {Phosphate}csAfscUfgUfAfgaagGfgGf | 2430 |
| | UfCfuaCfaGfuGfsusUf | | aUfgAfasUfsu | |
| D-2605 | {GalNAc3K2AhxC6}UfcAfuCfcCfcUfUf | 2431 | {Phosphate}csCfsaCfuGfUfagaaGfgGf | 2432 |
| | CfUfacAfgUfgGfsusUf | | gAfuGfasUfsu | |
| D-2606 | {GalNAc3K2AhxC6}CfaUfcCfcCfuUfCf | 2433 | {Phosphate}gsCfscAfcUfGfuagaAfgGf | 2434 |
| | UfAfcaGfuGfgCfsusUf | | gGfaUfgsUfsu | |
| D-2607 | {GalNAc3K2AhxC6}AfuCfcCfcUfuCfUf | 2435 | {Phosphate}gsGfscCfaCfUfguagAfaGf | 2436 |
| | AfCfagUfgGfcCfsusUf | | gGfgAfusUfsu | |
| D-2608 | {GalNAc3K2AhxC6}UfcCfcCfuUfcUfAf | 2437 | {Phosphate}asGfsgCfcAfCfuguaGfaAf | 2438 |
| | CfAfguGfgCfcUfsusUf | | gGfgGfasUfsu | |
| D-2609 | {GalNAc3K2AhxC6}CfcCfcUfuCfuAfCf | 2439 | {Phosphate}asAfsgGfcCfAfcuguAfgAf | 2440 |
| | AfGfugGfcCfuUfsusUf | | aGfgGfgsUfsu | |

### Example 2: Efficacy of Select PNPLA3 siRNA Molecules in RNA FISH Assay

[0181] A panel of fully chemically modified siRNA, including siRNA spanning the rs738409 and/or the rs738408 SNP in PNPLA3, were prepared and tested for potency and selectivity of mRNA knockdown in vitro. Each siRNA duplex consisted of two strands, the sense or ‘passenger’ strand and the antisense or ‘guide’ strand. The strands are 21 or 23 nucleotides in length with 19 complementary base pairs. In some instances, there are two base pair 3′ overhangs. The siRNA were prepared with substitution of the natural 2′-OH in the ribose of each nucleotide with either a 2′-OMe or 2′—F group. Optionally, phosphosdiester internucleotide linkages at one or both strands were replaced with phosphorothioates to reduce degradation by exonucleases.

[0182] The efficacy of each of the siRNA molecules in reducing PNPLA3 expression was assessed using a 384-well format in vitro siRNA transfection assay followed by a fluorescent in situ hybridization targeting ribonucleic acid molecules (RNA FISH) assay to determine IC50 and maximum activity values. This assay was performed on human hepatocellular carcinoma cell line Hep3B cells (ATCC HB-8064) and Chinese hamster ovary (CHO) cells expressing human PNPLA3 I1481. Human hepatocellular carcinoma HepB3 was maintained in EMEM media (ATCC 30-2003) supplemented with 10% fetal bovine serum and 1% antibiotic/antimycotic at 37° C. and 5% CO2. CHO cells expressing human PNPLA3 I1481 was maintained in media containing 50% CD-CHO (Life Technologies), 50% Ex-Cell CHO 5 Medium (Sigma), 8 mM L-Glutamine, 1×HT, 1% antibiotic/antimycotic, and 10 μg/mL Puromycin at 37° C. and 5% CO2.

[0183] For Hep3B cell assays, transfection complexes of the siRNA molecules and the Lipofectamine RNAiMAX transfection reagent (Life Technologies) in EMEM media (ATCC 30-2003) were prepared in 384-well plates (PerkinElmer), at 10 μg per well, in accordance with manufacturer's recommendations. For CHO human cell assays, transfection complexes of the siRNA molecules and the Lipofectamine RNAiMAX transfection reagent in F12K media (Mediatech) were prepared in 384-well plates, at 10 μg per well, in accordance with manufacturer's recommendations. Cells were diluted to 67,000 cells/ml in antibiotic/antimycotic-free media and 30 μl added to each well, a final density of 2000 cells/well in 40 μl media. After a 20 minute incubation at room temperature, plates were transferred to a 37° C. and 5% CO2 incubator. Hep3B cell transfection assays were incubated for 72 hours and CHO human PNPLA3 I1481 transfection assays were incubated for 48 hours.

[0184] At harvest, the cells were fixed in an 8% formaldehyde fixative solution (Thermo Scientific) for 15 minutes at room temperature. The plates were then subjected to dehydration with sequential 50%, 70%, and 100% ethanol washes. Plates were then sealed and stored at −20° C.

[0185] The RNA FISH assay was performed using the Affymetrix QuantiGene® View RNA HC Screening Assay kit (QVP0011), the Affymetrix View HC Signal Amplification Kit 3-plex (QVP0213), and Affymetrix gene specific probes: PNPLA3 Human 0.33 mL View RNA Type 6 (650 label) VA6-20279-01 and PPM Human 0.44 mL View RNA Type 1 (488 label) VA1-10148-01.

[0186] Plates were first rehydrated with sequential 100%, 70%, and 50% ethanol washes. Cells were then washed with PBS, and then permeabilized and protease-digested according to the kit instructions. The target Working Probe Sets were prepared according to the manufacturer's protocol, added to the wells, and incubated for 3 hours at 40° C. The manufacturer's protocol was followed for the sequential hybridizations with the Working Probe Sets, the Working PreAmps, the Working Amps, and the Working LPs. Last, nuclei counterstains were applied (Hoechst 33342 and Cell Mask Blue; Molecular Probes). Plates were incubated for 30 minutes at room temperature, washed with PBS, overlaid with 80 μl of PBS, and then the plates were sealed for imaging.

[0187] All plates were imaged on an Opera Phenix High Content Screening System (PerkinElmer), using the UV Channel for Hoechst 33342 and Cell Mask Blue, the 488 Channel for Typel probes, and the 647 Channel for Type6 probes.

[0188] RNA FISH data was analyzed using Columbus software and images were generated using Genedata Screener. The results of the assay for CHO transfected PNPLA3 I1481 are shown in Table 3. The results of the assay for CHO transfected PNPLA3 I148M are shown in Table 4. PNPLA3 knockdown provides a percentage of knockdown compared to control. Negative values indicate a decrease in PNPLA3 levels.

TABLE 3
RNA FISH assay on CHO transfected PNPLA3 I148I

| Duplex No. | IC50 (μM) | PNPLA3 knockdown (%) |
|---|---|---|
| D-2001 | .0589 | −33.9 |
| D-2002 | .0158 | −67.2 |
| D-2003 | .0427 | −43.4 |
| D-2004 | .00835 | −63.5 |
| D-2006 | .0177 | −77.8 |
| D-2008 | .125 | −10.7 |
| D-2009 | .00769 | −45.5 |
| D-2010 | .00558 | −80 |
| D-2011 | .035 | −3 |
| D-2012 | >0.5 | −3.7 |
| D-2013 | .036 | −6.4 |
| D-2014 | .0122 | −58.2 |
| D-2015 | >0.5 | 8 |
| D-2016 | >0.5 | 8 |
| D-2017 | .0153 | −73.2 |
| D-2018 | .00386 | −31.5 |
| D-2019 | .125 | |
| D-2020 | >0.5 | |
| D-2021 | >0.5 | 8 |
| D-2022 | >0.167 | −6.8 |
| D-2023 | .0257 | −36.9 |
| D-2024 | >0.5 | 4 |
| D-2025 | >0.5 | −2.5 |
| D-2026 | .022 | −35.1 |
| D-2027 | .00172 | −16.5 |
| D-2028 | >0.5 | 10 |
| D-2029 | .0106 | −56.2 |
| D-2032 | .00205 | −52.9 |
| D-2033 | .0107 | −61.7 |
| D-2034 | >0.5 | 6 |
| D-2035 | >0.5 | −3.8 |
| D-2036 | .00665 | −55.9 |
| D-2037 | >0.5 | 4 |
| D-2038 | >0.5 | 10 |
| D-2039 | .0116 | −23.9 |
| D-2040 | >0.5 | −25.4 |
| D-2041 | >0.5 | 9 |
| D-2042 | .00959 | −25.5 |
| D-2043 | >0.5 | 9 |
| D-2044 | .00552 | −29 |
| D-2045 | >0.5 | 9 |
| D-2046 | >0.5 | 9 |
| D-2047 | >0.5 | −5.9 |
| D-2048 | .00618 | −56.3 |
| D-2049 | >0.5 | 12 |
| D-2050 | >0.5 | 10 |
| D-2051 | >0.5 | −17.2 |
| D-2052 | >0.5 | −8.3 |
| D-2053 | >0.5 | 11 |
| D-2054 | >0.5 | −14.9 |
| D-2055 | >0.5 | −10.6 |
| D-2056 | >0.5 | 10 |
| D-2057 | .00485 | −59.2 |
| D-2058 | .014 | −53 |
| D-2059 | >0.5 | −4.9 |
| D-2060 | >0.5 | 18 |
| D-2061 | .00795 | −44.8 |
| D-2062 | .000668 | −74.6 |
| D-2063 | >0.5 | -21.8 |
| D-2064 | >0.5 | 9 |
| D-2065 | >0.5 | −10.5 |
| D-2066 | .0412 | −42.2 |
| D-2067 | >0.5 | 10 |

TABLE 4
RNA FISH assay on CHO transfected PNPLA3 I148M

| Duplex No. | IC50 (μM) | PNPLA3 knockdown (%) |
|---|---|---|
| D-2000 | .0316 | −29.2 |
| D-2001 | .0131 | −81.8 |
| D-2002 | .00216 | −90.5 |
| D-2003 | .022 | −50.4 |
| D-2004 | .00429 | −88 |
| D-2005 | >0.5 | 15 |
| D-2006 | .00301 | −89.2 |
| D-2007 | >0.5 | 6 |
| D-2009 | .00274 | −86.9 |
| D-2010 | .00203 | −93.3 |
| D-2011 | .000694 | −11.9 |
| D-2012 | >0.5 | −18 |
| D-2013 | .011 | −66.4 |
| D-2014 | .0057 | −84.3 |
| D-2015 | >0.5 | −13.5 |
| D-2016 | >0.5 | −12.4 |
| D-2017 | .00448 | −89.4 |
| D-2018 | .0104 | −36.2 |
| D-2019 | .0302 | −7.7 |
| D-2020 | .01 | −78.9 |
| D-2021 | .00435 | −83.5 |
| D-2022 | .00628 | −88.6 |
| D-2023 | .0143 | −44.3 |
| D-2024 | >0.5 | 11 |
| D-2025 | .00355 | −58.2 |
| D-2026 | .000867 | −39.4 |
| D-2027 | >0.5 | 32 |
| D-2028 | .00205 | −89.9 |
| D-2029 | .0019 | −94 |
| D-2030 | >0.5 | −9.4 |
| D-2031 | >0.5 | 4 |

[0189] RNA FISH was also run on a hepatic cell line containing the double mutant PNPLA3-rs738408-rs738409, as well as a control wild-type cell line, Hep3B. Hep3B and HepG2 cells (purchased from ATCC) were cultured in minimal essential medium (MEM from Corning for Hep3B and EMEM from ATCC for HepG2) supplemented with 10% fetal bovine serum (FBS, Sigma) and 1% penicillin-streptomycin (P—S, Corning). The siRNA transfection was performed as follows: 1 μL of test siRNAs and 4 μL of plain MEM or EMEM, depending on the cell line, were added to PDL-coated CellCarrier-384 Ultra assay plates (PerkinElmer) by BioMek FX (Beckman Coulter). 5 μL of Lipofectamine RNAiMAX (Thermo Fisher Scientific), pre-diluted in plain MEM or EMEM (specifically 0.035 μL RNAiMAX in 5 μL MEM for Hep3B and 0.06 μL of RNAiMAX in 5 μL EMEM for HepG2), was then dispensed into the assay plates by Multidrop Combi Reagent Dispenser (Thermo Fisher Scientific). After 20 mins incubation of the siRNA/RNAiMAX mixture at room temperature (RT), 30 μL of either Hep3B or HepG2 cells (2000 cells per well) in MEM or EMEM supplemented with 10% FBS and 1% P—S were added to the transfection complex using Multidrop Combi Reagent Dispenser. The assay plates were incubated for 20 mins at RT prior to being placed in an incubator. Cells were then incubated for 72 hrs at 37° C. and 5% CO2. ViewRNA ISH Cell Assay was performed following manufacture's protocol (Thermo Fisher Scientific) using an in-house assembled automated FISH assay platform for liquid handling. In brief, cells were fixed in 4% formaldehyde (Thermo Fisher Scientific) for 15 mins at RT, permeabilized with detergent for 3 mins at RT and then treated with protease solution for 10 mins at RT. Incubation of target-specific probe pairs (Thermo Fisher Scientific) was done for 3 hrs, while for Preamplifiers, Amplifiers and Label Probes (Thermo Fisher Scientific) were for 1 hr each. All hybridization steps were carried out at 40° C. in Cytomat 2 C-LIN automated incubator (Thermo Fisher Scientific). After hybridization reactions, cells were stained for 30 mins with Hoechst and CellMask Blue (Thermo Fisher Scientific) and then imaged on Opera Phenix (PerkinElmer). The images were analyzed using Columbus Image Data Storage and Analysis System (PerkinElmer) to obtain mean spot counts per cell. The spot counts were normalized using the high (containing phosphate-buffered saline, Corning) and low (without target probe pairs) control wells. The normalized values against the total siRNA concentrations were plotted and the data were fit to a four-parameter sigmoidal model in Genedata Screener (Genedata) to obtain IC50 and maximum activity. The results of the assay for HepG2 cells is shown in Table 5 and the results of the assay for Hep3B cells is shown in Table 6. PNPLA3 knockdown provides a percentage of knockdown compared to control. Negative values indicate a decrease in PNPLA3 levels. In instances where a duplex was run more than once, the average IC50 is shown, with a standard deviation.

TABLE 5
RNA FISH assay on hepatic HepG2 cells

| Duplex No. | IC50 (μM) | PNPLA3 knockdown (%) |
|---|---|---|
| D-2001 | .0132 | −70.5 |
| D-2003 | .0458 | −46.9 |
| D-2004 | .0049 | −74.2 |
| D-2006 | .00283 | −69.6 |
| D-2009 | .00448 | −62.2 |
| D-2010 | .00206 | −52 |
| D-2013 | .00319 | −71.7 |
| D-2014 | .00164 | −67.4 |
| D-2017 | .00222 | −60.9 |
| D-2018 | .00717 | −52.7 |
| D-2020 | .00664 | −68.3 |
| D-2021 | .00559 | −61.5 |
| D-2022 | .004 | −30.5 |
| D-2023 | >0.5 | −18 |
| D-2025 | .0041 | −61.9 |
| D-2026 | .00937 | −34.6 |
| D-2564 | 0.009 | −64.021 |
| D-2565 | 0.00609 | −70.965 |
| D-2566 | 0.00255 | −52.65 |
| D-2567 | 0.00584 | −56.603 |
| D-2568 | 0.0157 | −63.002 |
| D-2569 | 0.00327 | −64.898 |
| D-2570 | 0.00144 | −55.424 |
| D-2571 | >0.1 | −18.661 |
| D-2572 | 0.00557 | −25.668 |
| D-2573 | 0.0115 | −55.329 |
| D-2574 | 0.00289 | −69.84 |
| D-2575 | 0.00378 | −69.491 |
| D-2576 | 0.00527 | −64.841 |
| D-2577 | 0.00511 | −46.449 |
| D-2578 | 0.0026 | −67.821 |
| D-2579 | 0.00402 | −67.057 |
| D-2580 | 0.00119 | −64.422 |
| D-2581 | 0.00915 | −73.008 |
| D-2582 | 0.000823 | −77.053 |
| D-2583 | 0.00851 | −66.555 |
| D-2584 | 0.00513 | −54.442 |
| D-2585 | 0.0154 | −67.707 |
| D-2586 | 0.00701 | −69.624 |
| D-2587 | 0.00732 | −66.627 |
| D-2588 | 0.00226 | −70.854 |
| D-2589 | 0.00837 | −31.221 |
| D-2590 | 0.0249 | −41.857 |
| D-2591 | 0.009 | −64.021 |
| D-2592 | 0.00609 | −70.965 |
| D-2593 | 0.00255 | −52.65 |
| D-2594 | 0.00584 | −56.603 |
| D-2595 | 0.0157 | −63.002 |
| D-2596 | 0.00327 | −64.898 |
| D-2597 | 0.00144 | −55.424 |
| D-2598 | >0.1 | −18.661 |
| D-2599 | 0.00557 | −25.668 |
| D-2600 | 0.0115 | −55.329 |
| D-2601 | 0.00289 | −69.84 |
| D-2602 | 0.00378 | −69.491 |
| D-2603 | 0.00527 | −64.841 |
| D-2604 | 0.00511 | −46.449 |
| D-2605 | 0.0026 | −67.821 |
| D-2606 | 0.00402 | −67.057 |
| D-2607 | 0.00119 | −64.422 |
| D-2608 | 0.00915 | −73.008 |
| D-2609 | 0.000823 | −77.053 |
| D-2591 | 0.00851 | −66.555 |
| D-2592 | 0.00513 | −54.442 |
| D-2593 | 0.0154 | −67.707 |
| D-2594 | 0.00701 | −69.624 |
| D-2595 | 0.00732 | −66.627 |
| D-2596 | 0.00226 | −70.854 |
| D-2597 | 0.00837 | −31.221 |
| D-2598 | 0.0249 | −41.857 |
| D-2426 | 85.098 | −14.902 |
| D-2444 | 31.575 +/− 6.79 | −68.425 +/− 6.79 |
| D-2454 | 53.215 | −46.785 |
| D-2473 | 29.35 | −70.65 |

TABLE 6
RNA FISH assay on hepatic Hep3B cells

| Duplex No. | IC50 (μM) | PNPLA3 knockdown (%) |
|---|---|---|
| D-2001 | .00842 | −37 |
| D-2003 | .0158 | −32.1 |
| D-2004 | .00266 | −32.4 |
| D-2006 | .00948 | −54.1 |
| D-2009 | .00228 | −29.5 |
| D-2010 | .00219 | −37.2 |
| D-2013 | .00524 | −31.5 |
| D-2014 | .00148 | −37.6 |
| D-2017 | .00333 | −37.6 |
| D-2018 | .00315 | −21.3 |
| D-2020 | >0.5 | 6 |
| D-2021 | >0.5 | −1.6 |
| D-2022 | .00272 | −30.9 |
| D-2023 | >0.5 | 24 |
| D-2025 | .0101 | −30.3 |
| D-2026 | .00551 | −23 |
| D-2564 | 0.01 | −63.199 |
| D-2565 | 0.00938 | −58.392 |
| D-2566 | 0.00343 | −61.484 |
| D-2567 | 0.0175 | −53.489 |
| D-2568 | >0.1 | −18.367 |
| D-2569 | 0.0195 | −62.568 |
| D-2570 | 0.0127 | −77.141 |
| D-2571 | >0.1 | −15.922 |
| D-2572 | >0.1 | −12.434 |
| D-2573 | >0.1 | −14.649 |
| D-2574 | 0.0215 | −52.515 |
| D-2575 | 0.0203 | −53.175 |
| D-2576 | 0.018 | −48.137 |
| D-2577 | >0.1 | −16.105 |
| D-2578 | >0.1 | −21.309 |
| D-2579 | >0.1 | −17.510 |
| D-2580 | >0.1 | −24.616 |
| D-2581 | >0.1 | −13.987 |
| D-2582 | 0.0574 | −30.543 |
| D-2583 | >0.1 | −23.990 |
| D-2584 | >0.1 | −6.715 |
| D-2585 | >0.1 | −17.518 |
| D-2586 | >0.1 | −24.518 |
| D-2587 | 0.0391 | −58.478 |
| D-2588 | 0.0218 | −56.609 |
| D-2589 | >0.1 | −17.418 |
| D-2590 | >0.1 | −21.161 |
| D-2591 | 0.0167 | −59.366 |
| D-2592 | 0.0104 | −61.548 |
| D-2593 | Undefined | −61.879 |
| D-2594 | 0.0211 | −43.856 |
| D-2595 | 0.0272 | −63.020 |
| D-2596 | >0.1 | −10.278 |
| D-2597 | 0.0546 | −31.743 |
| D-2598 | Undefined | −47.517 |
| D-2599 | 0.00489 | −70.825 |
| D-2600 | >0.1 | −8.522 |
| D-2601 | 0.0364 | −31.836 |
| D-2602 | 0.00577 | −65.062 |
| D-2603 | 0.01 | −58.287 |
| D-2604 | 0.00353 | −40.649 |
| D-2605 | 0.0113 | −50.691 |
| D-2606 | >0.1 | −5.097 |
| D-2607 | 0.0261 | −49.898 |
| D-2608 | >0.1 | −23.747 |
| D-2609 | >0.1 | −23.804 |
| D-2426 | >0.1 | −15.207 |
| D-2454 | 0.00187 | −51.735 |
| D-2473 | >0.1 | −21.333 |

### Example 3: Droplet Digital PCR Assay of siRNA for PNPLA3-Rs738409 and PNPLA3-rs738409-rs738408

[0190] Following the manufacturers protocol, thawed human primary hepatocyte cells (Xenotech/Sekisui donor lot #HC3-38) in OptiThaw media (Xenotech cat #K8000), cells were centrifuged and post media aspiration, resuspended in OptiPlate hepatocyte media (Xenotech cat #K8200) and plated into 96 well collagen coated plates (Greiner cat #655950). Following a 2-4 hour incubation period, media was removed and replaced with OptiCulture hepatocyte media (Xenotech cat #K8300). 2-4 hours post addition of OptiCulture media, delivered GalNAc conjugated siRNAs to cells via free uptake (no transfection reagent). Cells were incubated 24-72 hours at 37° C. and 5% CO2. Cells were then lysed with Qiagen RLT buffer (79216)+1% 2-mercaptoethanol (Sigma, M-3148), and lysates were stored at −20° C. RNA was purified using a Qiagen QIACube HT instrument (9001793) and a Qiagen RNeasy 96 QIACube HT Kit (74171) according to manufacturer's instructions. Samples were analyzed using a QIAxpert system (9002340). cDNA was synthesized from RNA samples using the Applied Biosystems High Capacity cDNA Reverse Transcription kit (4368813), reactions were assembled according to manufacturer's instructions, input RNA concentration varied by sample. Reverse transcription was carried out on a BioRad tetrad thermal cycler (model #PTC-0240G) under the following conditions: 25° C. 10 minutes, 37° C. 120 minutes, 85° C. 5 minutes followed by (an optional) 4° C. infinite hold.

[0191] Droplet digital PCR (ddPCR) was performed using BioRad's QX200 AutoDG droplet digital PCR system according to manufacturer's instructions. Reactions were assembled into an Eppendorf clear 96 well PCR plate (951020303) using BioRad ddPCR Supermix for Probes (1863010), and fluorescently labeled qPCR assays for PNPLA3 (IDT Hs.PT.58.21464637, primer to probe ratio 3.6:1 and TBP (IDT Hs.PT.53a.20105486, primer to probe ratio 3.6:1) and RNase free water (Ambion, AM9937). Final primer/probe concentration is 900 nM/250 nM respectively, input cDNA concentration varied among wells. Droplets were formed using a BioRad Auto DG droplet generator (1864101) set up with manufacturer recommended consumables (BioRad DG32 cartridges 1864108, BioRad tips 1864121, Eppendorf blue 96 well PCR plate 951020362, BioRad droplet generation oil for probes 1864110 and a BioRad droplet plate assembly). Droplets were amplified on a BioRad C1000 touch thermal cycler (1851197) using the following conditions: enzyme activation 95° C. 10 minutes, denaturation 94° C. 30 seconds followed by annealing/extension 60° C. for one minute, 40 cycles using a 2° C./second ramp rate, enzyme deactivation 98° C. 10 minutes followed by (an optional) 4° C. infinite hold. Samples were then read on a BioRad QX200 Droplet Reader measuring FAM/HEX signal that correlates to PNPLA3 or TBP concentration. Data was analyzed using BioRad's QuantaSoft software package. Samples are gated by channel (fluorescent label) to determine the concentration per sample. Each sample is then expressed as the ratio of the concentration of the gene of interest (PNPLA3)/concentration of the housekeeping gene (TBP) to control for differences in sample loading. Data is then imported into Genedata Screener, where each test siRNA is normalized to the median of the neutral control wells (buffer only). IC50 values are reported in Table 7.

TABLE 7
ddPCR assay on primary hepatocyte cells

| Duplex No. | IC50 (μM) | % PNPLA3 knockdown |
|---|---|---|
| D-2068 | .0339 | −49.628 |
| D-2069 | .00408 | −52.997 |
| D-2070 | .00433 | −42.193 |
| D-2072 | .00884 | −53.16 |
| D-2073 | >2.0 | −7.435 |
| D-2078 | .0044 | −43.123 |
| D-2084 | 0.00499 | −38.791 |
| D-2085 | 0.00539 | −64.312 |
| D-2086 | >2.0 | −14.938 |
| D-2087 | >2.0 | −25.465 |
| D-2088 | 0.207 | −34.944 |
| D-2089 | 0.0107 | −38.791 |
| D-2090 | 0.0218 | −38.977 |
| D-2091 | 0.0508 | −41.209 |
| D-2092 | 0.00192 | −44 |
| D-2093 | 0.00634 | −30.233 |
| D-2094 | >2.0 | 4.93 |
| D-2095 | 0.00181 | −59.814 |
| D-2096 | 0.0181 | −52.807 |
| D-2099 | 0.00549 | −39.296 |
| D-2100 | 0.0142 | −55.281 |
| D-2158 | 0.0681 | −48.649 |
| D-2159 | 0.0325 | −36.036 |
| D-2160 | >0.667 | −13.514 |
| D-2161 | >2.0 | −24.229 |
| D-2162 | 0.0726 | −28.634 |
| D-2163 | >0.667 | −16.3 |
| D-2164 | >2.0 | −15.418 |
| D-2165 | 0.00644 | −26.872 |
| D-2166 | 0.00192 | −30.045 |
| D-2167 | >0.667 | −6.726 |
| D-2168 | >2.0 | −15.418 |
| D-2169 | >2.0 | −13.004 |
| D-2170 | >2.0 | −9.417 |
| D-2171 | 0.00505 | −44.395 |
| D-2172 | 0.003 | −55.336 |
| D-2173 | 0.00598 | −46.188 |
| D-2174 | >2.0 | −9.009 |
| D-2175 | 0.017 | −27.928 |
| D-2176 | 0.00452 | −35.426 |
| D-2177 | >2.0 | 4.5 |
| D-2178 | >2.0 | 1.8 |
| D-2179 | >2.0 | −6.306 |
| D-2180 | 0.00546 | −40.969 |
| D-2181 | 0.00152 | −43.119 |
| D-2182 | 0.00317 | −54.128 |
| D-2183 | 0.00948 | −58.079 |
| D-2184 | 0.0109 | −50.459 |
| D-2185 | >2.0 | −7.339 |
| D-2186 | 0.0021 | −48.624 |
| D-2187 | >2.0 | −11.009 |
| D-2188 | >2.0 | 1.32 |
| D-2191 | 0.0984 | −66.923 |
| D-2192 | 0.124 | −64.231 |
| D-2193 | 0.138 | −60.606 |
| D-2194 | 0.0478 | −54.182 |
| D-2195 | 0.0801 | −47.515 |
| D-2199 | 0.0517 | −62.973 |
| D-2201 | 0.0517 | −62.973 |
| D-2202 | 0.0165 | −72.404 |
| D-2203 | 0.00946 | −49.459 |
| D-2204 | 0.0241 | −58.545 |
| D-2205 | 0.0382 | −45.576 |
| D-2206 | 0.0222 | −50.946 |
| D-2209 | 0.0867 | −46.622 |
| D-2212 | 0.358 | −60 |
| D-2216 | 0.0826 | −58.942 |
| D-2218 | 0.0242 | −63.462 |
| D-2220 | 0.0113 | −69.333 |
| D-2221 | 0.138 | −55.541 |
| D-2224 | 0.0198 | −66.486 |
| D-2225 | 0.245 | −68.077 |
| D-2228 | 0.155 | −44.606 |
| D-2229 | 0.0651 | −38.909 |
| D-2231 | 0.0512 | −56.892 |
| D-2232 | 0.0678 | −67.981 |
| D-2233 | 0.00802 | −57.182 |
| D-2234 | 0.00473 | −55.947 |
| D-2235 | 0.00816 | −62.115 |
| D-2236 | 0.00245 | −51.542 |
| D-2237 | 0.00495 | −60 |
| D-2238 | 0.00561 | −63.017 |
| D-2239 | 0.00453 | −55.537 |
| D-2240 | 0.00584 | −56.116 |
| D-2241 | 0.00755 | −54.76 |
| D-2242 | 0.0137 | −56.332 |
| D-2243 | 0.00329 | −57.118 |
| D-2244 | 0.0127 | −56.909 |
| D-2245 | 0.00697 | −58.364 |
| D-2246 | 0.00713 | −56.828 |
| D-2247 | 0.00875 | −57.797 |
| D-2248 | 0.0098 | −58.59 |
| D-2249 | 0.00603 | −57.759 |
| D-2250 | 0.0105 | −62.155 |
| D-2251 | 0.00521 | −59.914 |
| D-2252 | 0.00988 | −58.678 |
| D-2253 | 0.00481 | −57.118 |
| D-2254 | 0.00721 | −56.332 |
| D-2255 | 0.00788 | −52.838 |
| D-2256 | 0.00831 | −55.455 |
| D-2257 | 0.00503 | −54.545 |
| D-2258 | 0.00626 | −54.545 |
| D-2259 | 0.00401 | −55.947 |
| D-2260 | 0.00379 | −52.423 |
| D-2261 | 0.00151 | −54.31 |
| D-2262 | 0.00292 | −53.448 |
| D-2263 | 0.00607 | −59.483 |
| D-2264 | 0.00703 | −59.504 |
| D-2265 | >4.0 | −20.524 |
| D-2266 | 0.0129 | −32.727 |
| D-2267 | 0.107 | −27.273 |
| D-2275 | 0.00359 | −45.701 |
| D-2276 | 0.00416 | −43.891 |
| D-2277 | 0.00218 | −49.14 |
| D-2278 | 0.00743 | −42.986 |
| D-2279 | 0.0116 | −53.846 |
| D-2280 | 0.00347 | −36.652 |
| D-2281 | 0.00449 | −43.891 |
| D-2282 | 0.0134 | −37.557 |
| D-2283 | 0.00864 | −34.842 |
| D-2284 | 0.00738 | −49.558 |
| D-2285 | 0.0202 | −38.053 |
| D-2286 | 0.00543 | −45.487 |
| D-2287 | 0.00934 | −47.611 |
| D-2288 | 0.00652 | −55.575 |
| D-2289 | 0.0259 | −61.593 |
| D-2290 | 0.00549 | −53.805 |
| D-2291 | 0.00476 | −51.062 |
| D-2292 | 0.0105 | −42.584 |
| D-2293 | 0.0059 | −45.455 |
| D-2294 | 0.0117 | −45.646 |
| D-2295 | 0.0109 | −52.823 |
| D-2296 | 0.01246 +/− 0.015 | −59.847 +/− 15.2 |
| D-2297 | 0.00828 | −44.444 |
| D-2298 | 0.0279 | −41.346 |
| D-2299 | 0.00529 | −55.926 |
| D-2300 | 0.0195 | −50.423 |
| D-2301 | 0.00838 | −35.577 |
| D-2302 | 0.00832 | −40.865 |
| D-2303 | 0.00371 | −40.096 |
| D-2304 | 0.00563 | −38.365 |
| D-2305 | 0.00639 | −40.385 |
| D-2306 | 0.00669 | −41.25 |
| D-2307 | 0.00212 | −38.462 |
| D-2308 | 0.00573 | −37.736 |
| D-2309 | 0.0645 | −33.962 |
| D-2310 | 0.00232 | −33.019 |
| D-2311 | 0.00181 | −31.132 |
| D-2312 | 0.0447 | −45.283 |
| D-2313 | 0.00655 | −42.453 |
| D-2314 | 0.00613 | −41.509 |
| D-2315 | 0.00941 | −50 |
| D-2316 | 0.0218 | −41.784 |
| D-2317 | 0.0142 | −42.723 |
| D-2318 | 0.0182 | −31.455 |
| D-2319 | >4.0 | −23.005 |
| D-2320 | 0.0228 | −37.089 |
| D-2321 | 0.00809 | −45.352 |
| D-2322 | 0.0165 | −44.601 |
| D-2323 | 0.0184 | −38.373 |
| D-2324 | 0.00766 | −41.627 |
| D-2325 | 0.00815 | −46.507 |
| D-2326 | 0.0168 | −48.325 |
| D-2327 | 0.00663 | −62.254 |
| D-2328 | 0.00716 | −39.367 |
| D-2329 | 0.044 | −52.036 |
| D-2330 | 0.00282 | −65.701 |
| D-2331 | 0.00411 | −53.991 |
| D-2332 | 0.0127 | −51.222 |
| D-2333 | 0.012 | −48.357 |
| D-2334 | 0.019 | −42.593 |
| D-2335 | 0.00448 | −47.418 |
| D-2336 | 0.00944 | −37.327 |
| D-2337 | 0.00514 | −37.327 |
| D-2338 | 0.154 | −38.249 |
| D-2339 | 0.0089 | −40.092 |
| D-2340 | 0.0169 | −48.148 |
| D-2341 | 0.00274 | −46.296 |
| D-2342 | 0.0225 | −42.723 |
| D-2343 | 0.00222 +/− 0.00136 | −43.218 +/− 4.81 |
| D-2344 | 0.0136 | −56.561 |
| D-2345 | 0.0222 | −50.226 |
| D-2346 | 0.0273 | −55.385 |
| D-2347 | 0.0164 | −41.784 |
| D-2348 | 0.0314 | −60.282 |
| D-2349 | 0.0103 | −65.1 |
| D-2350 | 0.0427 | −63.9 |

### Example 4: Efficacy Screening of Select PNPLA3 siRNA Molecules in a Humanized Mouse Model

[0192] Associated adenovirus (AAV; serotype AAV8 or AAV7; endotoxin-free, prepared internally by Amgen) diluted in phosphate buffered saline (Thermo Fisher Scientific, 14190-136) to 4e11 up to 1e12 viral particles per animal, was injected intravenously into the tail vein of C57BL/6NCrl male mice (Charles River Laboratories Inc.) to drive expression of either human PNPLA3^{WT} (PNPLA3-WT), PNPLA3^{rs738409} (PNPLA3-I148M), or PNPLA3^{rs738409-rs738408} (PNPLA3-I148M DM) in the liver. Mice were generally 10-12 weeks of age and an n=4-6 animals were included per group. Every round of screening included at least two vehicle-treated control groups: AAV-empty vector and AAV-PNPLA3^{WT} or PNPLA3^{rs738409} and PNPLA3^{rs738409-rs738408} treated with vehicle. All siRNAs were tested against AAV-PNPLA3^{WT}, PNPLA3^{rs738409}, and/or PNPLA3^{rs738409-rs738408}. Two weeks after AAV injection, mice were treated with a single dose of siRNA D-2324 (0.5 mM), via subcutaneous injection, at 0.5, 1.0, 3.0 or 5.0 milligrams per kilogram of animal, diluted in phosphate buffered saline (Thermo Fisher Scientific, 14190-136). At 8, 15, 22, 28 or 42 days post-siRNA injection, livers were collected from the animals, snap frozen in liquid nitrogen, processed for purified RNA using a QIACube HT instrument (Qiagen, 9001793) and RNeasy 96 QIACube HT kits (Qiagen, 74171) according to manufacturer's instructions. Samples were analyzed using a QIAxpert system (Qiagen, 9002340). RNA was treated with RQ1 RNase-Free DNase (Promega, M6101) and prepared for Real-Time qPCR using the TaqMan™ RNA-to-CT™ 1-Step kit (Applied Biosystems, 4392653). Real-Time qPCR was run on a QuantStudio Real-Time PCR machine. Results are based on gene expression of human PNPLA3 as normalized to mouse Gapdh (TaqMan™ assays from Invitrogen, hs00228747_m1 and 4352932E, respectively), and presented as the relative knockdown of human PNPLA3 mRNA expression compared to vehicle-treated control animals. Endogenous mouse Pnpla3 expression was determined for comparison (Invitrogen, Mm00504420_m1).

[0193] For hepatic triglyceride content analysis, approximately 0.05-0.1 milligrams of frozen liver from an animal was homogenized in one milliliter of isopropanol. After one hour of incubation on ice, samples were spun at 10,000 rpm in a microfuge, and supernatants transferred to a clean deep-well 96-well plate. Triglyceride content was determined using the colorimetric Infinity Triglyceride Reagent (Thermo Fisher Scientific, TR22421) and Triglyceride Standard (Pointe Scientific, T7531-STD) according to manufacturer's instructions. Results are presented as milligrams of triglyceride per milligrams of tissue.

[0194] All animal experiments described herein were approved by the Institutional Animal Care and Use Committee (IACUC) of Amgen and cared for in accordance to the Guide for the Care and Use of Laboratory Animals, 8^{th} Edition (National Research Council (U.S.). Committee for the Update of the Guide for the Care and Use of Laboratory Animals., Institute for Laboratory Animal Research (U.S.), and National Academies Press (U.S.) (2011) Guide for the care and use of laboratory animals. 8th Ed., National Academies Press, Washington, D.C. Mice were single-housed in an air-conditioned room at 22±2° C. with a twelve-hour light; twelve-hour darkness cycle (0600-1800 hours). Animals had ad libitum access to a regular chow diet (Envigo, 2920X) and to water (reverse osmosis-purified) via automatic watering system, unless otherwise indicated. At termination, blood was collected by cardiac puncture under deep anesthesia, and then, following Association for Assessment and Accreditation of Laboratory Animal Care (AAALAC) guidelines, euthanized by a secondary physical method. FIG. 1A-D. An example of five siRNA molecules screened for both dose-dependent mRNA knockdown and functional durability in vivo. Mice expressing human PNPLA3^{rs738409-rs738408} were treated with siRNA two-weeks after intravenous AAV injections. N=6 mice per group; data represented as the average and the standard error of the mean. (A) siRNAs were injected at 0.5, 1.0, 3.0, or 5.0 milligrams per kilogram of body weight subcutaneously into the abdomen of the mouse. Four weeks after siRNA treatment, mice were sacrificed, and the livers were collected and processed for gene expression analysis. The data represents the average relative knockdown of human PNPLA3^{rs738409-rs738408} in each group set to the vehicle-treated control group. (B) Livers from the same four-week treatment group were also processed for triglyceride content to access functional efficacy. The data represents the average milligrams of triglyceride per gram of tissue processed. (C) siRNAs were injected at 1.0 and 3.0 milligrams per kilogram of body weight subcutaneously into the abdomen of a parallel cohort of animals. Mice were harvested six weeks after siRNA treatment to compare durability of the siRNA molecules in vivo. The livers were collected and processed for gene expression analysis. The data represents the average relative knockdown of human PNPLA3^{rs738409-rs738408} in each group set to the vehicle-treated control group. (D) Livers from the same six-week treatment group were also processed for triglyceride content to access functional efficacy over time. The data represents the average milligrams of triglyceride per gram of tissue processed.

[0195] Data for relative knockdown is shown in Tables 8-12, showing relative knockdown at day 8, 15, 22, 28, and 42, respectively and the various doses. PNPLA3 knockdown is a percentage, with negative values indicating a decrease in PNPLA3 levels.

TABLE 8
Day 8 PNPLA3 knockdown assay

| | | AAV | Dose | PNPLA3 |
|---|---|---|---|---|
| Duplex | | particles/ | administered | knockdown |
| number | AAV vector | animal | (mg/kg) | (%) |
| D-2092 | PNPLA3-I148M | 1.00E+12 | 3 | −91.51 |
| D-2092 | PNPLA3-I148M | 1.00E+12 | 5 | −92.64 |
| D-2095 | PNPLA3-I148M | 1.00E+12 | 3 | −79.21 |
| D-2095 | PNPLA3-I148M | 1.00E+12 | 5 | −86.38 |
| D-2068 | PNPLA3-I148M | 4.00E+11 | 5 | −34.15 |
| D-2069 | PNPLA3-I148M | 4.00E+11 | 5 | −82.74 |
| D-2070 | PNPLA3-I148M | 4.00E+11 | 5 | −79.64 |
| D-2071 | PNPLA3-I148M | 4.00E+11 | 5 | −48.80 |
| D-2071 | PNPLA3-WT | 4.00E+11 | 5 | −59.43 |
| D-2075 | PNPLA3-I148M | 4.00E+11 | 5 | −79.10 |
| D-2075 | PNPLA3-WT | 4.00E+11 | 5 | −60.60 |
| D-2079 | PNPLA3-I148M | 4.00E+11 | 5 | −50.08 |
| D-2072 | PNPLA3-I148M | 4.00E+11 | 5 | −44.40 |
| D-2072 | PNPLA3-WT | 4.00E+11 | 5 | −43.75 |
| D-2077 | PNPLA3-I148M | 4.00E+11 | 5 | −28.46 |
| D-2076 | PNPLA3-I148M | 4.00E+11 | 5 | −83.25 |
| D-2078 | PNPLA3-I148M | 4.00E+11 | 5 | −49.10 |
| D-2078 | PNPLA3-WT | 4.00E+11 | 5 | −3.45 |
| D-2073 | PNPLA3-I148M | 4.00E+11 | 5 | −39.42 |
| D-2074 | PNPLA3-I148M | 4.00E+11 | 5 | −46.68 |
| D-2074 | PNPLA3-WT | 4.00E+11 | 5 | −5.11 |
| D-2084 | PNPLA3-I148M | 4.00E+11 | 5 | −87.49 |
| D-2084 | PNPLA3-I148M | 8.00E+11 | 5 | −88.75 |
| D-2084 | PNPLA3-I148M | 8.00E+11 | 1 | −16.49 |
| D-2084 | PNPLA3-WT | 8.00E+11 | 1 | −15.42 |
| D-2085 | PNPLA3-I148M | 4.00E+11 | 5 | −77.14 |
| D-2085 | PNPLA3-I148M | 8.00E+11 | 5 | −84.42 |
| D-2085 | PNPLA3-I148M | 8.00E+11 | 1 | −25.19 |
| D-2085 | PNPLA3-WT | 8.00E+11 | 1 | −21.14 |
| D-2086 | PNPLA3-I148M | 4.00E+11 | 5 | −64.54 |
| D-2086 | PNPLA3-I148M | 4.00E+11 | 5 | −52.95 |
| D-2087 | PNPLA3-I148M | 4.00E+11 | 5 | −20.15 |
| D-2088 | PNPLA3-I148M | 4.00E+11 | 5 | −47.18 |
| D-2088 | PNPLA3-I148M | 8.00E+11 | 5 | −66.96 |
| D-2089 | PNPLA3-I148M | 8.00E+11 | 5 | −85.47 |
| D-2089 | PNPLA3-WT | 8.00E+11 | 1 | −21.01 |
| D-2089 | PNPLA3-I148M | 8.00E+11 | 1 | −34.21 |
| D-2089 | PNPLA3-I148M | 1.00E+12 | 5 | −90.55 |
| D-2090 | PNPLA3-I148M | 8.00E+11 | 5 | −89.58 |
| D-2090 | PNPLA3-I148M | 8.00E+11 | 1 | −50.13 |
| D-2090 | PNPLA3-WT | 8.00E+11 | 1 | 8.76 |
| D-2091 | PNPLA3-WT | 8.00E+11 | 5 | −35.70 |
| D-2092 | PNPLA3-I148M | 8.00E+11 | 5 | −92.34 |
| D-2092 | PNPLA3-I148M | 8.00E+11 | 1 | −51.35 |
| D-2092 | PNPLA3-WT | 8.00E+11 | 1 | −42.88 |
| D-2093 | PNPLA3-I148M | 8.00E+11 | 5 | −83.87 |
| D-2094 | PNPLA3-I148M | 8.00E+11 | 5 | −70.12 |
| D-2095 | PNPLA3-I148M | 8.00E+11 | 1 | −29.95 |
| D-2095 | PNPLA3-WT | 8.00E+11 | 1 | 67.40 |
| D-2095 | PNPLA3-I148M | 8.00E+11 | 5 | −85.42 |
| D-2096 | PNPLA3-WT | 8.00E+11 | 5 | −90.44 |
| D-2081 | PNPLA3-I148M | 8.00E+11 | 5 | 6.25 |
| D-2081 | PNPLA3-I148M | 8.00E+11 | 5 | −11.81 |
| D-2097 | PNPLA3-I148M | 8.00E+11 | 5 | −87.61 |
| D-2098 | PNPLA3-I148M | 8.00E+11 | 5 | −79.84 |
| D-2099 | PNPLA3-I148M | 8.00E+11 | 5 | −84.36 |
| D-2100 | PNPLA3-I148M | 8.00E+11 | 5 | −79.67 |
| D-2101 | PNPLA3-I148M | 8.00E+11 | 5 | −89.64 |
| D-2102 | PNPLA3-I148M | 8.00E+11 | 5 | −61.49 |
| D-2103 | PNPLA3-I148M | 8.00E+11 | 5 | −19.65 |
| D-2104 | PNPLA3-I148M | 8.00E+11 | 5 | −79.70 |
| D-2104 | PNPLA3-I148M | 1.00E+12 | 5 | −82.87 |
| D-2105 | PNPLA3-I148M | 8.00E+11 | 5 | −84.49 |
| D-2105 | PNPLA3-I148M | 1.00E+12 | 5 | −87.71 |
| D-2152 | PNPLA3-I148M | 1.00E+12 | 5 | −39.35 |
| D-2153 | PNPLA3-I148M | 1.00E+12 | 5 | −79.04 |
| D-2154 | PNPLA3-I148M | 1.00E+12 | 5 | −66.72 |
| D-2155 | PNPLA3-I148M | 1.00E+12 | 5 | −44.68 |
| D-2156 | PNPLA3-I148M | 1.00E+12 | 5 | −84.72 |
| D-2157 | PNPLA3-I148M | 1.00E+12 | 5 | −17.25 |
| D-2280 | PNPLA3-I148M DM | 1.00E+12 | 5 | −99.70 |
| D-2280 | PNPLA3 WT | 1.00E+12 | 5 | −51.13 |
| D-2295 | PNPLA3-WT | 1.00E+12 | 5 | −35.90 |
| D-2295 | PNPLA3-I148M DM | 1.00E+12 | 5 | −94.68 |
| D-2296 | PNPLA3-WT | 1.00E+12 | 5 | −23.24 |
| D-2296 | PNPLA3-I148M DM | 1.00E+12 | 5 | −92.78 |
| D-2297 | PNPLA3-WT | 1.00E+12 | 5 | 43.71 |
| D-2297 | PNPLA3-I148M DM | 1.00E+12 | 5 | −94.59 |
| D-2324 | PNPLA3-WT | 1.00E+12 | 5 | 6.53 |
| D-2324 | PNPLA3-I148M DM | 1.00E+12 | 5 | −97.39 |
| D-2326 | PNPLA3-WT | 1.00E+12 | 5 | −8.25 |
| D-2326 | PNPLA3-I148M DM | 1.00E+12 | 5 | −77.82 |
| D-2328 | PNPLA3-WT | 1.00E+12 | 5 | −2.12 |
| D-2328 | PNPLA3-I148M DM | 1.00E+12 | 5 | −92.49 |

TABLE 9
Day 15 PNPLA3 knockdown assay

| | | AAV | Dose | PNPLA3 |
|---|---|---|---|---|
| Duplex | | particles/ | administered | knockdown |
| number | AAV vector | animal | (mg/kg) | (%) |
| D-2092 | PNPLA3-I148M | 1.00E+12 | 3 | −87.58 |
| D-2092 | PNPLA3-I148M | 1.00E+12 | 5 | −93.96 |
| D-2095 | PNPLA3-I148M | 1.00E+12 | 3 | −81.73 |
| D-2095 | PNPLA3-I148M | 1.00E+12 | 5 | −72.99 |
| D-2131 | PNPLA3-I148M | 1.00E+12 | 5 | −66.02 |
| D-2186 | PNPLA3-I148M | 1.00E+12 | 5 | −87.67 |
| D-2089 | PNPLA3-I148M | 1.00E+12 | 5 | −95.01 |
| D-2104 | PNPLA3-I148M | 1.00E+12 | 5 | −76.01 |
| D-2105 | PNPLA3-I148M | 1.00E+12 | 5 | −72.67 |
| D-2123 | PNPLA3-I148M | 1.00E+12 | 5 | −56.93 |
| D-2128 | PNPLA3-I148M | 1.00E+12 | 5 | −37.26 |
| D-2138 | PNPLA3-I148M | 1.00E+12 | 5 | −62.16 |
| D-2149 | PNPLA3-I148M | 1.00E+12 | 5 | −72.34 |
| D-2156 | PNPLA3-I148M | 1.00E+12 | 5 | −75.81 |
| D-2259 | PNPLA3-I148M | 1.00E+12 | 5 | −79.15 |
| D-2260 | PNPLA3-I148M | 1.00E+12 | 5 | −69.97 |
| D-2261 | PNPLA3-I148M | 1.00E+12 | 5 | −50.40 |
| D-2262 | PNPLA3-I148M | 1.00E+12 | 5 | −84.36 |
| D-2263 | PNPLA3-I148M | 1.00E+12 | 5 | −77.08 |
| D-2264 | PNPLA3-I148M | 1.00E+12 | 5 | −40.86 |
| D-2269 | PNPLA3-I148M | 1.00E+12 | 5 | −37.55 |
| D-2270 | PNPLA3-I148M | 1.00E+12 | 5 | −77.42 |
| D-2271 | PNPLA3-I148M | 1.00E+12 | 5 | −26.87 |
| D-2272 | PNPLA3-I148M | 1.00E+12 | 5 | −56.05 |
| D-2280 | PNPLA3-I148M DM | 1.00E+12 | 3 | −86.30 |
| D-2287 | PNPLA3-I148M DM | 1.00E+12 | 3 | −94.73 |
| D-2289 | PNPLA3-I148M DM | 1.00E+12 | 3 | −93.48 |
| D-2292 | PNPLA3-I148M DM | 1.00E+12 | 3 | −82.48 |
| D-2297 | PNPLA3-I148M DM | 1.00E+12 | 3 | −72.61 |
| D-2322 | PNPLA3-I148M DM | 1.00E+12 | 3 | −32.92 |
| D-2324 | PNPLA3-I148M DM | 1.00E+12 | 3 | −87.56 |
| D-2327 | PNPLA3-I148M DM | 1.00E+12 | 3 | −86.70 |
| D-2345 | PNPLA3-WT | 1.00E+12 | 5 | −83.48 |
| D-2346 | PNPLA3-WT | 1.00E+12 | 5 | −75.93 |
| D-2347 | PNPLA3-WT | 1.00E+12 | 5 | −22.83 |
| D-2348 | PNPLA3-WT | 1.00E+12 | 5 | −20.09 |
| D-2349 | PNPLA3-WT | 1.00E+12 | 5 | −67.70 |
| D-2350 | PNPLA3-WT | 1.00E+12 | 5 | −57.51 |
| D-2351 | PNPLA3-WT | 1.00E+12 | 5 | −56.11 |
| D-2352 | PNPLA3-I148M DM | 1.00E+12 | 3 | −92.21 |
| D-2353 | PNPLA3-I148M DM | 1.00E+12 | 3 | −89.55 |
| D-2354 | PNPLA3-I148M DM | 1.00E+12 | 3 | −90.21 |
| D-2358 | PNPLA3-I148M DM | 1.00E+12 | 3 | −95.10 |
| D-2359 | PNPLA3-I148M DM | 1.00E+12 | 3 | −91.17 |
| D-2360 | PNPLA3-I148M DM | 1.00E+12 | 3 | −63.98 |
| D-2361 | PNPLA3-I148M DM | 1.00E+12 | 3 | −92.47 |
| D-2362 | PNPLA3-I148M DM | 1.00E+12 | 3 | −95.10 |
| D-2364 | PNPLA3-I148M DM | 1.00E+12 | 3 | −95.31 |
| D-2370 | PNPLA3-I148M DM | 1.00E+12 | 3 | −95.99 |
| D-2370 | PNPLA3 WT | 1.00E+12 | 3 | 11.88 |
| D-2371 | PNPLA3-I148M DM | 1.00E+12 | 3 | −91.14 |
| D-2372 | PNPLA3-I148M DM | 1.00E+12 | 3 | −93.71 |
| D-2373 | PNPLA3-I148M DM | 1.00E+12 | 3 | −73.80 |
| D-2374 | PNPLA3-I148M DM | 1.00E+12 | 3 | −75.98 |
| D-2375 | PNPLA3-I148M DM | 1.00E+12 | 3 | −96.68 |
| D-2376 | PNPLA3-I148M DM | 1.00E+12 | 3 | −96.78 |
| D-2377 | PNPLA3-I148M DM | 1.00E+12 | 3 | −96.88 |
| D-2378 | PNPLA3-I148M DM | 1.00E+12 | 3 | −97.60 |
| D-2379 | PNPLA3-I148M DM | 1.00E+12 | 3 | −94.73 |
| D-2380 | PNPLA3-I148M DM | 1.00E+12 | 3 | −94.73 |
| D-2381 | PNPLA3-I148M DM | 1.00E+12 | 3 | −76.24 |
| D-2382 | PNPLA3-I148M DM | 1.00E+12 | 3 | −80.33 |
| D-2383 | PNPLA3-I148M DM | 1.00E+12 | 3 | −71.98 |
| D-2384 | PNPLA3-I148M DM | 1.00E+12 | 3 | −87.24 |
| D-2385 | PNPLA3-I148M DM | 1.00E+12 | 3 | −78.77 |
| D-2386 | PNPLA3-I148M DM | 1.00E+12 | 3 | −70.58 |
| D-2387 | PNPLA3-I148M DM | 1.00E+12 | 3 | −67.09 |
| D-2390 | PNPLA3-I148M DM | 1.00E+12 | 3 | −92.97 |
| D-2391 | PNPLA3-I148M DM | 1.00E+12 | 3 | −94.10 |
| D-2392 | PNPLA3-I148M DM | 1.00E+12 | 3 | −92.14 |
| D-2395 | PNPLA3-I148M DM | 1.00E+12 | 3 | −85.63 |
| D-2396 | PNPLA3-I148M DM | 1.00E+12 | 3 | −94.63 |
| D-2397 | PNPLA3-I148M DM | 1.00E+12 | 3 | −92.90 |
| D-2398 | PNPLA3-I148M DM | 1.00E+12 | 3 | −95.48 |
| D-2399 | PNPLA3-I148M DM | 1.00E+12 | 3 | −93.40 |
| D-2400 | PNPLA3-I148M DM | 1.00E+12 | 3 | −97.55 |
| D-2401 | PNPLA3-I148M DM | 1.00E+12 | 3 | −96.98 |
| D-2402 | PNPLA3-I148M DM | 1.00E+12 | 3 | −97.25 |
| D-2403 | PNPLA3 WT | 1.00E+12 | 3 | 36.90 |
| D-2404 | PNPLA3-I148M DM | 1.00E+12 | 3 | −95.08 |
| D-2405 | PNPLA3-I148M DM | 1.00E+12 | 3 | −96.93 |
| D-2406 | PNPLA3 WT | 1.00E+12 | 3 | 28.80 |
| D-2395 | PNPLA3-I148M DM | 1.00E+12 | 3 | −17.25 |
| D-2396 | PNPLA3-I148M DM | 1.00E+12 | 3 | −93.70 |
| D-2413 | PNPLA3-I148M DM | 1.00E+12 | 3 | −94.80 |
| D-2415 | PNPLA3-I148M DM | 1.00E+12 | 3 | −90.95 |
| D-2418 | PNPLA3-I148M DM | 1.00E+12 | 3 | −88.45 |
| D-2419 | PNPLA3 WT | 1.00E+12 | 3 | 43.72 |
| D-2453 | PNPLA3 WT | 1.00E+12 | 3 | −81.33 |
| D-2454 | PNPLA3 WT | 1.00E+12 | 3 | −83.38 |
| D-2455 | PNPLA3 WT | 1.00E+12 | 3 | −68.85 |
| D-2456 | PNPLA3 WT | 1.00E+12 | 3 | −89.03 |
| D-2460 | PNPLA3 WT | 1.00E+12 | 3 | −68.65 |
| D-2461 | PNPLA3 WT | 1.00E+12 | 3 | −47.85 |

TABLE 10
Day 22 PNPLA3 knockdown assay

| | | AAV | Dose | PNPLA3 |
|---|---|---|---|---|
| Duplex | | particles/ | administered | knockdown |
| number | AAV vector | animal | (mg/kg) | (%) |
| D-2092 | PNPLA3-I148M | 1.00E+12 | 3 | −74.61 |
| D-2092 | PNPLA3-I148M | 1.00E+12 | 5 | −85.78 |
| D-2095 | PNPLA3-I148M | 1.00E+12 | 3 | −27.78 |
| D-2095 | PNPLA3-I148M | 1.00E+12 | 5 | −33.60 |
| D-2324 | PNPLA3-I148M DM | 1.00E+12 | 3 | −56.68 |
| D-2324 | PNPLA3-I148M DM | 1.00E+12 | 5 | −88.02 |
| D-2089 | PNPLA3-I148M | 1.00E+12 | 5 | −80.86 |
| D-2104 | PNPLA3-I148M | 1.00E+12 | 5 | −65.61 |
| D-2105 | PNPLA3-I148M | 1.00E+12 | 5 | −39.67 |
| D-2280 | PNPLA3-I148M DM | 1.00E+12 | 5 | −84.12 |
| D-2297 | PNPLA3-I148M DM | 1.00E+12 | 3 | −58.01 |
| D-2297 | PNPLA3-I148M DM | 1.00E+12 | 5 | −76.43 |
| D-2352 | PNPLA3-I148M DM | 1.00E+12 | 5 | −92.74 |
| D-2353 | PNPLA3-I148M DM | 1.00E+12 | 5 | −84.54 |
| D-2354 | PNPLA3-I148M DM | 1.00E+12 | 5 | −89.06 |
| D-2355 | PNPLA3-I148M DM | 1.00E+12 | 5 | −95.53 |
| D-2356 | PNPLA3-I148M DM | 1.00E+12 | 5 | −94.99 |
| D-2357 | PNPLA3-I148M DM | 1.00E+12 | 5 | −97.37 |

TABLE 11
Day 28 PNPLA3 knockdown assay

| | | AAV | Dose | PNP |
|---|---|---|---|---|
| Duplex | | particles/ | administered | knockdown |
| number | AAV vector | animal | (mg/kg) | (%) |
| D-2092 | PNPLA3-I148M | 1.00E+12 | 3 | −72.57 |
| D-2092 | PNPLA3-I148M | 1.00E+12 | 5 | −82.74 |
| D-2095 | PNPLA3-I148M | 1.00E+12 | 3 | −32.93 |
| D-2095 | PNPLA3-I148M | 1.00E+12 | 5 | −55.31 |
| D-2089 | PNPLA3-I148M | 1.00E+12 | 5 | −63.49 |
| D-2104 | PNPLA3-I148M | 1.00E+12 | 5 | −44.39 |
| D-2105 | PNPLA3-I148M | 1.00E+12 | 5 | −39.80 |
| D-2370 | PNPLA3-I148M DM | 1.00E+12 | 3 | −89.28 |
| D-2400 | PNPLA3-I148M DM | 1.00E+12 | 3 | −88.23 |
| D-2401 | PNPLA3-I148M DM | 1.00E+12 | 3 | −91.95 |
| D-2402 | PNPLA3-I148M DM | 1.00E+12 | 0.5 | −50.65 |
| D-2402 | PNPLA3-I148M DM | 1.00E+12 | 1 | −69.37 |
| D-2402 | PNPLA3-I148M DM | 1.00E+12 | 3 | −96.43 |
| D-2402 | PNPLA3-I148M DM | 1.00E+12 | 3 | −85.44 |
| D-2402 | PNPLA3-I148M DM | 1.00E+12 | 3 | −90.52 |
| D-2404 | PNPLA3-I148M DM | 1.00E+12 | 3 | −95.67 |
| D-2419 | PNPLA3-I148M DM | 1.00E+12 | 0.5 | −68.83 |
| D-2419 | PNPLA3-I148M DM | 1.00E+12 | 1 | −76.88 |
| D-2419 | PNPLA3-I148M DM | 1.00E+12 | 3 | −97.53 |
| D-2419 | PNPLA3-I148M DM | 1.00E+12 | 3 | −93.95 |
| D-2419 | PNPLA3-I148M DM | 1.00E+12 | 3 | −89.66 |
| D-2419 | PNPLA3-I148M DM | 1.00E+12 | 3 | −93.25 |
| D-2420 | PNPLA3-I148M DM | 1.00E+12 | 3 | −95.93 |
| D-2421 | PNPLA3-I148M DM | 1.00E+12 | 0.5 | −50.01 |
| D-2421 | PNPLA3-I148M DM | 1.00E+12 | 1 | −66.30 |
| D-2421 | PNPLA3-I148M DM | 1.00E+12 | 3 | −94.99 |
| D-2421 | PNPLA3-I148M DM | 1.00E+12 | 3 | −80.05 |
| D-2421 | PNPLA3 WT | 1.00E+12 | 3 | −36.65 |
| D-2421 | PNPLA3-I148M DM | 1.00E+12 | 3 | −91.08 |
| D-2425 | PNPLA3-I148M DM | 1.00E+12 | 3 | −16.07 |
| D-2426 | PNPLA3-I148M DM | 1.00E+12 | 3 | −37.54 |
| D-2427 | PNPLA3-I148M DM | 1.00E+12 | 3 | −25.19 |
| D-2428 | PNPLA3-I148M DM | 1.00E+12 | 3 | −16.71 |
| D-2437 | PNPLA3-I148M DM | 1.00E+12 | 3 | −93.78 |
| D-2438 | PNPLA3-I148M DM | 1.00E+12 | 3 | −90.63 |
| D-2439 | PNPLA3-I148M DM | 1.00E+12 | 3 | −88.10 |
| D-2440 | PNPLA3-I148M DM | 1.00E+12 | 3 | −95.25 |
| D-2441 | PNPLA3-I148M DM | 1.00E+12 | 3 | −90.13 |
| D-2442 | PNPLA3-I148M DM | 1.00E+12 | 3 | −57.24 |
| D-2443 | PNPLA3-I148M DM | 1.00E+12 | 3 | −95.43 |
| D-2444 | PNPLA3-I148M DM | 1.00E+12 | 3 | −90.58 |
| D-2445 | PNPLA3-I148M DM | 1.00E+12 | 3 | −84.55 |
| D-2446 | PNPLA3-I148M DM | 1.00E+12 | 3 | −81.50 |
| D-2427 | PNPLA3-I148M DM | 1.00E+12 | 3 | −90.09 |
| D-2462 | PNPLA3-I148M DM | 1.00E+12 | 3 | −89.20 |
| D-2463 | PNPLA3-I148M DM | 1.00E+12 | 3 | −41.25 |
| D-2464 | PNPLA3-I148M DM | 1.00E+12 | 3 | −60.53 |
| D-2465 | PNPLA3-I148M DM | 1.00E+12 | 3 | −91.35 |
| D-2466 | PNPLA3-I148M DM | 1.00E+12 | 3 | −93.68 |
| D-2467 | PNPLA3-I148M DM | 1.00E+12 | 3 | −85.15 |
| D-2472 | PNPLA3-I148M DM | 1.00E+12 | 0.5 | −46.58 |
| D-2472 | PNPLA3-I148M DM | 1.00E+12 | 1 | −74.47 |
| D-2472 | PNPLA3-I148M DM | 1.00E+12 | 3 | −88.79 |
| D-2472 | PNPLA3 WT | 1.00E+12 | 3 | −23.16 |
| D-2472 | PNPLA3-I148M DM | 1.00E+12 | 3 | −90.54 |
| D-2473 | PNPLA3-I148M DM | 1.00E+12 | 0.5 | −57.95 |
| D-2473 | PNPLA3-I148M DM | 1.00E+12 | 1 | −71.96 |
| D-2473 | PNPLA3-I148M DM | 1.00E+12 | 3 | −91.70 |
| D-2473 | PNPLA3-I148M DM | 1.00E+12 | 3 | −85.94 |
| D-2473 | PNPLA3 WT | 1.00E+12 | 3 | −18.70 |

TABLE 12
Day 42 PNPLA3 knockdown assay

| | | AAV | Dose | PNPLA3 |
|---|---|---|---|---|
| Duplex | | particles/ | administered | knockdown |
| number | AAV vector | animal | (mg/kg) | (%) |
| D-2402 | PNPLA3-1148M DM | 1.00E+12 | 1 | −57.74 |
| D-2402 | PNPLA3-1148M DM | 1.00E+12 | 3 | −83.75 |
| D-2419 | PNPLA3-1148M DM | 1.00E+12 | 1 | −71.07 |
| D-2419 | PNPLA3-1148M DM | 1.00E+12 | 3 | −70.8 |
| D-2421 | PNPLA3-1148M DM | 1.00E+12 | 1 | −62.21 |
| D-2421 | PNPLA3-1148M DM | 1.00E+12 | 3 | −80.12 |
| D-2472 | PNPLA3-1148M DM | 1.00E+12 | 1 | −60.54 |
| D-2472 | PNPLA3-1148M DM | 1.00E+12 | 3 | −74.77 |
| D-2473 | PNPLA3-1148M DM | 1.00E+12 | 1 | −54.55 |
| D-2473 | PNPLA3-1148M DM | 1.00E+12 | 3 | −81.13 |

### Example 5: Prevention and Rescue of NAFLD by siRNA Molecules in a Humanized PNPLA3^{rs738409-rs738408} Mouse Model

[0196] The ‘American Lifestyle-Induced Obesity Syndrome’, or ALIOS mouse model for NAFLD/NASH is developed by feeding mice with a diet high in trans-fats (45% of the total amount of fat) and sugar (Tetri 2008). For these studies, eight to ten-week old C57BL/6NCrl male mice (Charles River Laboratories Inc.) were injected with AAV-empty vector or AAV8-PNPLA3^{rs738409-rs738408}, as described previously. At the time of AAV injection, mice were either maintained on a normal chow diet or placed on the ALIOS diet (Envigo, TD.06303) complete with drinking water composed of 55% fructose and 45% glucose (Sigma, F0127 and G7021, respectively) until harvest. In previous experiments, it was established that over-expression of PNPLA3^{rs738409-rs738408}, in this context, both accelerates and worsens NAFLD phenotypes (data not shown).

[0197] Two weeks after AAV injection and diet initiation, mice were treated with a single dose of siRNA D-2324 (0.5 mM), via subcutaneous injection, at 5.0 milligrams per kilogram of animal, diluted in phosphate buffered saline (Thermo Fisher Scientific, 14190-136) or a vehicle control. Dosing was repeated biweekly until harvest. At the time of harvest, body weights were collected, followed by serum via cardiac puncture under isoflurane anesthesia, followed by liver weights. The median lobe was fixed via 10% neutral buffered formalin, followed by paraffin processing and embedding. The remainder of the liver was snap frozen for content and gene expression analysis, as described previously.

[0198] Snap frozen liver tissue was processed for RNA and gene expression analysis, as described previously. Results are shown as both the raw Ct value and relative mRNA expression of the indicated gene normalized to mouse Gapdh. (TaqMan™ assays from Invitrogen: human PNPLA3, hs00228747_m1; mouse Pnpla3, Mm00504420_m1; mouse Gapdh, 4352932E). Formalin-fixed tissues were processed for Hemotoxylin and Eosin staining (Dako, CS70030-2, CS70130-2, respectively) according to the manufacturer's instructions. Scoring for steatosis and inflammation was performed by a board-certified pathologist.

[0199] Serum analysis included TIMP1, a biomarker associated with NASH and NASH-related fibrosis (Youssani 2011). The TIMP1 ELISA (R&D Systems, MTM100) was performed according to the manufacturer's instructions.

[0200] FIG. 2A-G. To evaluate the ability of a PNPLA3^{rs738409-rs738408}-specific siRNA molecule D-2324 to prevent the development of phenotypes associated with NAFLD and overexpression of PNPLA3^{rs738409-rs738408}, mice received AAV8-empty vector (EV), or AAV8-PNPLA3^{rs738409-rs738408}, or vehicle, and were maintained on a regular chow diet or transitioned to the ALIOS diet. Two weeks after AAV injections, mice were treated with siRNA or vehicle, every other week for six weeks; a total of three injection rounds. Mice were harvested at the eight-week time point. Results are presented as the group average and standard error, N=8 per group. Asterisks represent statistical significance to the AAV8-PNPLA3^{rs738409-rs738408} cohort, generated by One-way ANOVA employing Dunnett's multiple comparisons test. (A) The ratio of liver weight (grams) to body weight (grams) at the time of harvest. Adjusted P values: no AAV+vehicle group, ****<0.0001, AAV-EV+vehicle, **=0.0018, AAV-PNPLA3^{rs738409-rs738408}+siRNA, ****<0.0001. (B) Confirmation of human PNPLA3 mRNA expression and silencing in the liver by qPCR. (left) Raw Ct value and (right) relative fold mRNA expression normalized to mouse Gapdh; comparing the ALIOS-fed PNPLA3^{rs738409-rs738408}+vehicle and PNPLA3^{rs738409-rs738408}+siRNA groups. (C) Analysis of mouse Pnpla3 mRNA expression in liver by qPCR indicates endogenous Pnpla3 is not significantly altered by AAV-mediated over-expression or siRNA silencing. (left) Raw Ct value and (right) relative fold mRNA expression normalized to mouse Gapdh; comparing the chow-fed no-AAV group to the ALIOS-fed PNPLA3^{rs738409-rs738408}+vehicle and PNPLA3^{rs738409-rs738408}+siRNA groups. (D) Hepatic triglyceride content presented as milligrams of triglyceride per gram of liver tissue. Adjusted P values: no AAV+vehicle group, ****<0.0001, AAV-EV+vehicle, *=0.0393, AAV-PNPLA3^{rs738409-rs738408} siRNA, **=0.0063. (E) Serum TIMP1 presented as picograms per milliliter of serum. Adjusted P values: no AAV+vehicle group, ****<0.0001, AAV-EV+vehicle, ****<0.0001, AAV-PNPLA3^{rs738409-rs738408}+siRNA, ****<0.0001. (F) Histological indication of steatosis based on H&E staining, scored as: Within normal limits (0), minimal (1), mild (2), moderate (3), and severe (4). Adjusted P values: no AAV+vehicle group, ****<0.0001, AAV-EV+vehicle, no significance, AAV-PNPLA3^{rs738409-rs738408}+siRNA, **=0.0012. (G) Histological indication of inflammation based on H&E staining, scored as: Within normal limits (0), minimal (1), mild (2), moderate (3), and severe (4). Adjusted P values: no AAV+vehicle group, ****<0.0001, AAV-EV+vehicle, ****<0.0001, AAV-PNPLA3^{rs738409-rs738408}+siRNA, ****<0.0001.

[0201] FIG. 3A-G. To evaluate the ability of a PNPLA3^{rs738409-rs738408}-specific siRNA molecule to prevent further progression of PNPLA3^{rs738409-rs738408}-mediated disease after disease onset, mice received AAV8-empty vector (EV), or AAV8-PNPLA3^{rs738409-rs738408}, or vehicle, and were maintained on a regular chow diet or transitioned to the ALIOS diet. Eight weeks after AAV injections and diet changes, mice were treated with siRNA or vehicle, every other week for eight more weeks; a total of four injection rounds. Mice were harvested at the sixteen-week time point. Although no change was observed in steatosis, if siRNA treatment began after disease induction, several other disease-associated end points were significantly reduced. Results are presented as averages and standard error, N=8 per group. Asterisks represent statistical significance to the AAV8-PNPLA3^{rs738409-rs738408} cohort, generated by One-way ANOVA employing Dunnett's multiple comparisons test. (A) The ratio of liver weight (grams) to body weight (grams) at the time of harvest. Adjusted P values: no AAV+vehicle group, ****<0.0001, AAV-EV+vehicle, not significant, AAV-PNPLA3^{rs738409-rs738408}+siRNA, ***=0.0006. (B) Confirmation of human PNPLA3 mRNA expression and silencing in the liver by qPCR. (left) Raw Ct value and (right) relative fold mRNA expression normalized to mouse Gapdh; comparing the ALIOS-fed PNPLA3^{rs738409-rs738408}+vehicle and PNPLA3^{rs738409-rs738408}+siRNA groups. (C) Analysis of mouse Pnpla3 mRNA expression in liver by qPCR indicates endogenous Pnpla3 is not significantly altered by AAV-mediated over-expression or siRNA silencing. (left) Raw Ct value and (right) relative fold mRNA expression normalized to mouse Gapdh; comparing the chow-fed no-AAV group to the ALIOS-fed PNPLA3^{rs738409-rs738408}+vehicle and PNPLA3^{rs738409-rs738408}+siRNA groups. (D) Hepatic triglyceride content presented as milligrams of triglyceride per gram of liver tissue. Adjusted P values: AAV-EV+vehicle, not significant, AAV-PNPLA3^{rs738409-rs738408}+siRNA, *=0.0403. (E) Serum TIMP1 presented as picograms per milliliter of serum. Adjusted P values: no AAV+vehicle group, ****<0.0001, AAV-EV+vehicle, **=0.0027, AAV-PNPLA3^{rs738409-rs738408}+siRNA, **=0.002. (F) Histological indication of steatosis based on H&E staining, scored as: Within normal limits (0), minimal (1), mild (2), moderate (3), and severe (4). Adjusted P values: no AAV+vehicle group, ****<0.0001, AAV-EV+vehicle, not significant, AAV-PNPLA3^{rs738409-rs738408}+siRNA, not significant. (G) Histological indication of inflammation based on H&E staining, scored as: Within normal limits (0), minimal (1), mild (2), moderate (3), and severe (4). Adjusted P values: no AAV+vehicle group, ****<0.0001, AAV-EV+vehicle, not significant, AAV-PNPLA3^{rs738409-rs738408}+siRNA, **=0.0068.

[0202] FIG. 4A-D. To evaluate the ability of a PNPLA3^{rs738409-rs738408}-specific siRNA molecule to rescue disease-associated phenotypes due to overexpression of PNPLA3^{rs738409-rs738408}, liver and serum from ALIOS-fed eight-week AAV8-PNPLA3^{rs738409-rs738408}-vehicle treated mice were compared to livers and serum from ALIOS-fed sixteen-week vehicle- or siRNA-treated AAV8-PNPLA3^{rs738409-rs738408} mice. Although no change was observed in steatosis at this time point with siRNA treatment, hepatic triglyceride, serum TIMP1, and inflammation were all statistically lower at sixteen weeks compared to vehicle controls at eight weeks. Results are presented as averages and standard error, N=8 per group. Asterisks represent statistical significance to the eight-week AAV8-PNPLA3^{rs738409-rs738408} vehicle-treated cohort, generated by One-way ANOVA employing Dunnett's multiple comparisons test. (A) Hepatic triglyceride content presented as milligrams of triglyceride per gram of liver tissue. Adjusted P values: 16WK AAV-PNPLA3^{rs738409-rs738408}+vehicle, not significant; 16WK AAV-PNPLA3^{rs738409-rs738408}+siRNA, **=0.0011. (B) Serum Timp1 presented as picograms per milliliter of serum. Adjusted P values: 16WK AAV-PNPLA3^{rs738409-rs738408}+vehicle, not significant; 16WK AAV-PNPLA3^{rs738409-rs738408}+siRNA, *=0.0134. (C) Histological indication of steatosis based on H&E staining, scored as: Within normal limits (0), minimal (1), mild (2), moderate (3), and severe (4). Adjusted P values: 16WK AAV-PNPLA3^{rs738409-rs738408}+vehicle, not significant; 16WK AAV-PNPLA3^{rs738409-rs738408}+siRNA, not significant. (D) Histological indication of inflammation based on H&E staining, scored as: Within normal limits (0), minimal (1), mild (2), moderate (3), and severe (4). Adjusted P values: 16WK AAV-PNPLA3^{rs738409-rs738408}+vehicle, not significant; 16WK AAV-PNPLA3^{rs738409-rs738408}+siRNA *=0.0112.

### Example 6: Prevention of Liver Fibrosis by siRNA Molecules in a Humanized PNPLA3^{rs738409-rs738408} Mouse Model

[0203] The “AMLN” diet, developed by Amylin Pharmaceuticals (Clapper 2013), is a modified version of the ALIOS diet. The feed includes a ten-fold increase in cholesterol (2%) and additional sucrose. Mice placed on the “AMLN” diet develop mild to moderate fibrosis after 20-30 weeks (Clapper, Mells and Kristiansen papers). For this study, eight to ten-week old C57BL/6NCrl male mice (Charles River Laboratories Inc.) were injected with AAV-empty vector or AAV-PNPLA3^{rs738409-rs738408}, as described above, to accelerate disease onset. At the time of AAV injection, mice were continued on a normal chow diet or placed on the Envigo diet, TD.170748, complete with drinking water composed of 55% fructose and 45% glucose (Sigma, F0127 and G7021, respectively) until harvest.

[0204] Two weeks post-AAV injection and diet initiation, mice were treated with a single dose of siRNA D-2324 (0.5 mM), via subcutaneous injection, at 5.0 milligrams per kilogram of animal, diluted in phosphate buffered saline (Thermo Fisher Scientific, 14190-136) or a vehicle control. Dosing was repeated biweekly until harvest. At the time of harvest, body weights were collected, followed by serum via cardiac puncture under isoflurane anesthesia, followed by liver weights. The median lobe was fixed via 10% neutral buffered formalin, followed by paraffin processing and embedding. The remainder of the liver was snap frozen for gene expression analysis.

[0205] Snap frozen liver tissue was processed for RNA and gene expression analysis, as described previously. Results are shown as both the raw Ct value and relative mRNA expression of the indicated gene normalized to mouse Gapdh. (TaqMan™ assays from Invitrogen: human PNPLA3, hs00228747_m1; mouse Pnpla3, Mm00504420_m1; mouse Collal, Mm00801666_g1; mouse Col3a1, Mm01254471_g1; Col4a1, Mm01210125_m1; mouse Gapdh, 4352932E). Col1a1, Col3a1 and Col4a1 are extracellular matrix markers associated with hepatic stellate cell activation and liver fibrosis (Baiocchini 2016).

[0206] Formalin-fixed tissues were processed for Hemotoxylin, Eosin, and Masson's Trichrome staining (Dako, CS70030-2, CS70130-2, AR17311-2, respectively) according to the manufacturer's instructions. Anti-Smooth Muscle Actin staining was performed without antigen retrieval and using a DAKO autostainer. Slides were processed using Peroxidazed 1 and Sniper (Biocare, PX968 and BS966, respectively) and stained with monoclonal anti-Actin, alpha-Smooth Muscle antibody (Sigma, F3777), followed by Rabbit anti-FITC (Invitrogen, 711900), Envision-Rabbit HRP polymer (Dako, K4003), DAB+ (Dako, K3468), and Hemotoxylin. Scoring for the amount of steatosis, inflammation, oval cell/bile duct hyperplasia, and aSMA-positive cells was performed by a board-certified pathologist.

[0207] Serum was analyzed for mouse TIMP1 (R&D Systems, MTM100) and Mouse Cytokeratin 18-M30 (Cusabio, CSB-E14265m) according to manufacturer's instructions. In addition to TIMP1, Cytokine 18-M30 has been identified as a potential biomarker for NAFLD/NASH, including early fibrosis (Neuman 2014 and Yang 2015). FIG. 5A-L. To evaluate the ability of a PNPLA3^{rs738409-rs738408}-specific siRNA molecule to prevent the development of early fibrosis, mice received AAV8-empty vector (EV), or AAV8-PNPLA3^{rs738409-rs738408}, or vehicle, and were maintained on a regular chow diet or transitioned to the AMLN diet. Two weeks after AAV injections, mice were treated with siRNA, D-2324, or vehicle, every other week for ten more weeks; a total of six injection rounds. Mice were harvested at the ten-week time point. Results are presented as averages and standard error, Chow-fed no AAV+vehicle and AMLN-fed AAV8-PNPLA3^{rs738409-rs738408}+vehicle, N=8 per group; AMLN-fed AAV8-PNPLA3^{rs738409-rs738408}+vehicle and AAV8-PNPLA3^{rs738409-rs738408}+siRNA, N=12 per group. Asterisks represent statistical significance to the AAV8-PNPLA3^{rs738409-rs738408}−vehicle-treated cohort, generated by One-way ANOVA employing Dunnett's multiple comparisons test. (A) The ratio of liver weight (grams) to body weight (grams) at the time of harvest. Adjusted P values: no AAV+vehicle group, ****<0.0001, AAV-EV+vehicle, not significant, AAV-PNPLA3^{rs738409-rs738408}+siRNA, ****_{<}0.0001. (B) Confirmation of human PNPLA3 mRNA expression and silencing in the liver by qPCR. (left) Raw Ct value and (right) relative fold mRNA expression normalized to mouse Gapdh; comparing the PNPLA3^{rs73849-rs738408}+vehicle and PNPLA3^{rs738409-rs738408}+siRNA groups. (C) Analysis of mouse Pnpla3 mRNA expression in liver by qPCR indicates endogenous Pnpla3 is not significantly altered by AAV-mediated over-expression or siRNA silencing. (left) Raw Ct value and (right) relative fold mRNA expression normalized to mouse Gapdh; comparing the chow-fed no-AAV group to the AMLN-fed PNPLA3^{rs738409-rs738408}+vehicle and PNPLA3^{rs738409-rs738408}+siRNA groups. (D) Serum Timp1 presented as picograms per milliliter of serum. Adjusted P values: no AAV+vehicle group, ****<0.0001, AAV-EV+vehicle, ****<0.0001, AAV-PNPLA3^{rs738409-rs738408}+siRNA, ****<0.0001. (E) Serum CK18m30 presented as picograms per milliliter of serum. Adjusted P values: no AAV+vehicle group, ****<0.0001, AAV-EV+vehicle, ****<0.0001, AAV-PNPLA3^{rs738409-rs738408}+siRNA, ****<0.0001. (F) Histological indication of inflammation based on H&E staining, scored as: Within normal limits (0), minimal (1), mild (2), moderate (3), and severe (4). Adjusted P values: no AAV+vehicle group, ****<0.0001, AAV-EV+vehicle, *=0.0108, AAV-PNPLA3^{rs738409-rs738408}+siRNA, ****_{<}0.0001. (G) Histological indication of oval cell/bile duct hyperplasia based on H&E staining, scored as: Within normal limits (0), minimal (1), mild (2), moderate (3), and severe (4). Adjusted P values: no AAV+vehicle group, ****<0.0001, AAV-EV+vehicle, not significant, AAV-PNPLA3^{rs738409-rs738408}+siRNA, **=0.0081. (H) Immunohistochemical staining for anti-Smooth Muscle Actin, scored as: Within normal limits (0), minimal (1), mild (2), moderate (3), and severe (4). Adjusted P values: no AAV+vehicle group, ****<0.0001, AAV-EV+vehicle, *=0.0101, AAV-PNPLA3^{rs738409-rs738408}+siRNA, ***=0.0002. (I) Masson's Trichrome staining for fibrosis, scored as: Within normal limits (0), minimal (1), mild (2), moderate (3), and severe (4). Adjusted P values: no AAV+vehicle group, ****<0.0001, AAV-EV+vehicle, not significant, AAV-PNPLA3^{rs738409-rs738408}+siRNA, not significant. (J) Mouse Collal mRNA expression in liver by qPCR. Relative fold mRNA expression normalized to mouse Gapdh. Adjusted P values: no AAV+vehicle group, ****<0.0001, AAV-EV+vehicle, ****<0.0001, AAV-PNPLA3^{rs738409-rs738408}+siRNA, ****<0.0001. (K) Mouse Col3a1 mRNA expression in liver by qPCR. Relative fold mRNA expression normalized to mouse Gapdh. Adjusted P values: no AAV+vehicle group, ****<0.0001, AAV-EV+vehicle, ****<0.0001, AAV-PNPLA3^{rs738409-rs738408}+siRNA, ****<0.0001. (L) Mouse Col4a1 mRNA expression in liver by qPCR. Relative fold mRNA expression normalized to mouse Gapdh. Adjusted P values: no AAV+vehicle group, ****<0.0001, AAV-EV+vehicle, ***<0.0005, AAV-PNPLA3^{rs738409-rs738408}+siRNA, **<0.0041.

1. An RNAi construct comprising a sense strand and an antisense strand, wherein the antisense strand comprises a region having at least 15 contiguous nucleotides differing by no more than 3 nucleotides from an antisense sequence listed in Table 1 or 2, and wherein the RNAi construct inhibits the expression of Patatin-Like Phospholipase Domain Containing 3 (PNPLA3).

2. The RNAi construct of claim 1, wherein the antisense strand comprises a region that is complementary to a PNPLA3 mRNA sequence.

3. The RNAi construct of claim 2, wherein the sense strand comprises a region having at least 15 contiguous nucleotides differing by no more than 3 nucleotides from an antisense sequence listed in Table 1 or 2.

4. The RNAi construct of claim 3, wherein the construct preferentially inhibits a PNPLA3-rs738409 minor allele.

5. (canceled)

6. The RNAi construct of claim 3, wherein the construct preferentially inhibits a PNPLA3-rs738408 minor allele.

7. The RNAi construct of claim 6, wherein the construct has at least 10% greater inhibition of a PNPLA3-rs738409-rs738408 double minor allele as compared to the major allele.

8. The RNAi construct of claim 3, wherein the sense strand comprises a sequence that is sufficiently complementary to the sequence of the antisense strand to form a duplex region of about 15 to about 30 base pairs in length.

9-11. (canceled)

12. The RNAi construct of claim 8, wherein the sense strand and the antisense strand are each about 15 to about 30 nucleotides in length.

13-15. (canceled)

16. The RNAi construct of claim 8, wherein the RNAi construct comprises at least one blunt end.

17. The RNAi construct of claim 16, wherein the RNAi construct comprises at least one nucleotide overhang of 1 to 4 unpaired nucleotides.

18. (canceled)

19. The RNAi construct of claim 17, wherein the RNAi construct comprises a nucleotide overhang at the 3′ end of the sense strand, the 3′ end of the antisense strand, or the 3′ end of both the sense strand and the antisense strand.

20. The RNAi construct of claim 17, wherein the nucleotide overhang comprises a 5′-UU-3′ dinucleotide or a 5′-dTdT-3′ dinucleotide.

21. The RNAi construct of claim 1, wherein the RNAi construct comprises at least one modified nucleotide, wherein the modified nucleotide is a 2′-modified nucleotide.

22. (canceled)

23. The RNAi construct of claim 21, wherein the modified nucleotide is a 2′-fluoro modified nucleotide, a 2′-O-methyl modified nucleotide, a 2′-O-methoxyethyl modified nucleotide, a 2′-O-allyl modified nucleotide, a bicyclic nucleic acid (BNA), a glycol nucleic acid, an inverted base or combinations thereof.

24-26. (canceled)

27. The RNAi construct of claim 1, wherein the RNAi construct comprises at least one phosphorothioate internucleotide linkage.

28-32. (canceled)

33. The RNAi construct of claim 1, wherein the RNAi construct reduces the expression level of PNPLA3 in liver cells following incubation with the RNAi construct as compared to the PNPLA3 expression level in liver cells that have been incubated with a control RNAi construct.

34. The RNAi construct of claim 27, wherein the liver cells are Hep3B or HepG2 cells.

35. The RNAi construct of claim 1, wherein the RNAi construct inhibits at least 10% of PNPLA3 expression at 5 nM in Hep3B cells in vitro, inhibits at least 10% of PNPLA3 expression at 5 nM in HepG2 cells in vitro, inhibits PNPLA3 expression in Hep3B cells with an IC50 of less than about 1 nM, or inhibits PNPLA3 expression in HepG2 cells with an IC50 of less than about 1 nM.

36-38. (canceled)

39. A pharmaceutical composition comprising the RNAi construct of claim 1 and a pharmaceutically acceptable carrier, excipient, or diluent.

40. A method for reducing the expression of PNPLA3 in a patient in need thereof comprising administering to the patient the RNAi construct of claim 1.

41. The method of claim 40, wherein the expression level of PNPLA3 in hepatocytes is reduced in the patient following administration of the RNAi construct as compared to the PNPLA3 expression level in a patient not receiving the RNAi construct.

The application's sequence listing, which the Patent Office published only in electronic form, follows.

SEQUENCE LISTING (2440 sequences)

SEQ ID NO: 1 - RNA, 21 nt, Artificial Sequence
  source: /note="Description of Artificial Sequence: Synthetic oligonucleotide"
gggcaauaaaguaccugcuuu

SEQ ID NO: 2 - RNA, 21 nt, Artificial Sequence
  source: /note="Description of Artificial Sequence: Synthetic oligonucleotide"
agcagguacuuuauugcccuu

SEQ ID NO: 3 - RNA, 21 nt, Artificial Sequence
  source: /note="Description of Artificial Sequence: Synthetic oligonucleotide"
cggccaauguccaccagcuuu

SEQ ID NO: 4 - RNA, 21 nt, Artificial Sequence
  source: /note="Description of Artificial Sequence: Synthetic oligonucleotide"
agcugguggacauuggccguu

SEQ ID NO: 5 - RNA, 21 nt, Artificial Sequence
  source: /note="Description of Artificial Sequence: Synthetic oligonucleotide"
gguccagccugaacuucuuuu

SEQ ID NO: 6 - RNA, 21 nt, Artificial Sequence
  source: /note="Description of Artificial Sequence: Synthetic oligonucleotide"
aagaaguucaggcuggaccuu

SEQ ID NO: 7 - RNA, 21 nt, Artificial Sequence
  source: /note="Description of Artificial Sequence: Synthetic oligonucleotide"
gcuucauccccuucuacaguu

SEQ ID NO: 8 - RNA, 21 nt, Artificial Sequence
  source: /note="Description of Artificial Sequence: Synthetic oligonucleotide"
cuguagaaggggaugaagcuu

SEQ ID NO: 9 - RNA, 21 nt, Artificial Sequence
  source: /note="Description of Artificial Sequence: Synthetic oligonucleotide"
gcggcuuccugggcuucuauu

SEQ ID NO: 10 - RNA, 21 nt, Artificial Sequence
  source: /note="Description of Artificial Sequence: Synthetic oligonucleotide"
uagaagcccaggaagccgcuu

SEQ ID NO: 11 - RNA, 21 nt, Artificial Sequence
  source: /note="Description of Artificial Sequence: Synthetic oligonucleotide"
gccucugagcugaguugguuu

SEQ ID NO: 12 - RNA, 21 nt, Artificial Sequence
  source: /note="Description of Artificial Sequence: Synthetic oligonucleotide"
accaacucagcucagaggcuu

SEQ ID NO: 13 - RNA, 21 nt, Artificial Sequence
  source: /note="Description of Artificial Sequence: Synthetic oligonucleotide"
gugacaacguacccuucauuu

SEQ ID NO: 14 - RNA, 21 nt, Artificial Sequence
  source: /note="Description of Artificial Sequence: Synthetic oligonucleotide"
augaaggguacguugucacuu

SEQ ID NO: 15 - RNA, 21 nt, Artificial Sequence
  source: /note="Description of Artificial Sequence: Synthetic oligonucleotide"
cccgccuccaggucccaaauu

SEQ ID NO: 16 - RNA, 21 nt, Artificial Sequence
  source: /note="Description of Artificial Sequence: Synthetic oligonucleotide"
uuugggaccuggaggcggguu

SEQ ID NO: 17 - RNA, 21 nt, Artificial Sequence
  source: /note="Description of Artificial Sequence: Synthetic oligonucleotide"
cuucauccccuucuacaguuu

SEQ ID NO: 18 - RNA, 21 nt, Artificial Sequence
  source: /note="Description of Artificial Sequence: Synthetic oligonucleotide"
acuguagaaggggaugaaguu

SEQ ID NO: 19 - RNA, 21 nt, Artificial Sequence
  source: /note="Description of Artificial Sequence: Synthetic oligonucleotide"
gguauguuccugcuucauguu

SEQ ID NO: 20 - RNA, 21 nt, Artificial Sequence
  source: /note="Description of Artificial Sequence: Synthetic oligonucleotide"
caugaagcaggaacauaccuu

SEQ ID NO: 21 - RNA, 21 nt, Artificial Sequence
  source: /note="Description of Artificial Sequence: Synthetic oligonucleotide"
guauguuccugcuucaugcuu

SEQ ID NO: 22 - RNA, 21 nt, Artificial Sequence
  source: /note="Description of Artificial Sequence: Synthetic oligonucleotide"
gcaugaagcaggaacauacuu

SEQ ID NO: 23 - RNA, 21 nt, Artificial Sequence
  source: /note="Description of Artificial Sequence: Synthetic oligonucleotide"
uauguuccugcuucaugccuu

SEQ ID NO: 24 - RNA, 21 nt, Artificial Sequence
  source: /note="Description of Artificial Sequence: Synthetic oligonucleotide"
ggcaugaagcaggaacauauu

SEQ ID NO: 25 - RNA, 21 nt, Artificial Sequence
  source: /note="Description of Artificial Sequence: Synthetic oligonucleotide"
auguuccugcuucaugcccuu

SEQ ID NO: 26 - RNA, 21 nt, Artificial Sequence
  source: /note="Description of Artificial Sequence: Synthetic oligonucleotide"
gggcaugaagcaggaacauuu

SEQ ID NO: 27 - RNA, 21 nt, Artificial Sequence
  source: /note="Description of Artificial Sequence: Synthetic oligonucleotide"
uguuccugcuucaugcccuuu

SEQ ID NO: 28 - RNA, 21 nt, Artificial Sequence
  source: /note="Description of Artificial Sequence: Synthetic oligonucleotide"
agggcaugaagcaggaacauu

SEQ ID NO: 29 - RNA, 21 nt, Artificial Sequence
  source: /note="Description of Artificial Sequence: Synthetic oligonucleotide"
guuccugcuucaugcccuuuu

SEQ ID NO: 30 - RNA, 21 nt, Artificial Sequence
  source: /note="Description of Artificial Sequence: Synthetic oligonucleotide"
aagggcaugaagcaggaacuu

SEQ ID NO: 31 - RNA, 21 nt, Artificial Sequence
  source: /note="Description of Artificial Sequence: Synthetic oligonucleotide"
uuccugcuucaugcccuucuu

SEQ ID NO: 32 - RNA, 21 nt, Artificial Sequence
  source: /note="Description of Artificial Sequence: Synthetic oligonucleotide"
gaagggcaugaagcaggaauu

SEQ ID NO: 33 - RNA, 21 nt, Artificial Sequence
  source: /note="Description of Artificial Sequence: Synthetic oligonucleotide"
uccugcuucaugcccuucuuu

SEQ ID NO: 34 - RNA, 21 nt, Artificial Sequence
  source: /note="Description of Artificial Sequence: Synthetic oligonucleotide"
agaagggcaugaagcaggauu

SEQ ID NO: 35 - RNA, 21 nt, Artificial Sequence
  source: /note="Description of Artificial Sequence: Synthetic oligonucleotide"
ccugcuucaugcccuucuauu

SEQ ID NO: 36 - RNA, 21 nt, Artificial Sequence
  source: /note="Description of Artificial Sequence: Synthetic oligonucleotide"
uagaagggcaugaagcagguu

SEQ ID NO: 37 - RNA, 21 nt, Artificial Sequence
  source: /note="Description of Artificial Sequence: Synthetic oligonucleotide"
cugcuucaugcccuucuacuu

SEQ ID NO: 38 - RNA, 21 nt, Artificial Sequence
  source: /note="Description of Artificial Sequence: Synthetic oligonucleotide"
guagaagggcaugaagcaguu

SEQ ID NO: 39 - RNA, 21 nt, Artificial Sequence
  source: /note="Description of Artificial Sequence: Synthetic oligonucleotide"
ugcuucaugcccuucuacauu

SEQ ID NO: 40 - RNA, 21 nt, Artificial Sequence
  source: /note="Description of Artificial Sequence: Synthetic oligonucleotide"
uguagaagggcaugaagcauu

SEQ ID NO: 41 - RNA, 21 nt, Artificial Sequence
  source: /note="Description of Artificial Sequence: Synthetic oligonucleotide"
gcuucaugcccuucuacaguu

SEQ ID NO: 42 - RNA, 21 nt, Artificial Sequence
  source: /note="Description of Artificial Sequence: Synthetic oligonucleotide"
cuguagaagggcaugaagcuu

SEQ ID NO: 43 - RNA, 21 nt, Artificial Sequence
  source: /note="Description of Artificial Sequence: Synthetic oligonucleotide"
cuucaugcccuucuacaguuu

SEQ ID NO: 44 - RNA, 21 nt, Artificial Sequence
  source: /note="Description of Artificial Sequence: Synthetic oligonucleotide"
acuguagaagggcaugaaguu

SEQ ID NO: 45 - RNA, 21 nt, Artificial Sequence
  source: /note="Description of Artificial Sequence: Synthetic oligonucleotide"
uucaugcccuucuacaguguu

SEQ ID NO: 46 - RNA, 21 nt, Artificial Sequence
  source: /note="Description of Artificial Sequence: Synthetic oligonucleotide"
cacuguagaagggcaugaauu

SEQ ID NO: 47 - RNA, 21 nt, Artificial Sequence
  source: /note="Description of Artificial Sequence: Synthetic oligonucleotide"
ucaugcccuucuacagugguu

SEQ ID NO: 48 - RNA, 21 nt, Artificial Sequence
  source: /note="Description of Artificial Sequence: Synthetic oligonucleotide"
ccacuguagaagggcaugauu

SEQ ID NO: 49 - RNA, 21 nt, Artificial Sequence
  source: /note="Description of Artificial Sequence: Synthetic oligonucleotide"
caugcccuucuacaguggcuu

SEQ ID NO: 50 - RNA, 21 nt, Artificial Sequence
  source: /note="Description of Artificial Sequence: Synthetic oligonucleotide"
gccacuguagaagggcauguu

SEQ ID NO: 51 - RNA, 21 nt, Artificial Sequence
  source: /note="Description of Artificial Sequence: Synthetic oligonucleotide"
augcccuucuacaguggccuu

SEQ ID NO: 52 - RNA, 21 nt, Artificial Sequence
  source: /note="Description of Artificial Sequence: Synthetic oligonucleotide"
ggccacuguagaagggcauuu

SEQ ID NO: 53 - RNA, 21 nt, Artificial Sequence
  source: /note="Description of Artificial Sequence: Synthetic oligonucleotide"
ugcccuucuacaguggccuuu

SEQ ID NO: 54 - RNA, 21 nt, Artificial Sequence
  source: /note="Description of Artificial Sequence: Synthetic oligonucleotide"
aggccacuguagaagggcauu

SEQ ID NO: 55 - RNA, 21 nt, Artificial Sequence
  source: /note="Description of Artificial Sequence: Synthetic oligonucleotide"
gcccuucuacaguggccuuuu

SEQ ID NO: 56 - RNA, 21 nt, Artificial Sequence
  source: /note="Description of Artificial Sequence: Synthetic oligonucleotide"
aaggccacuguagaagggcuu

SEQ ID NO: 57 - RNA, 21 nt, Artificial Sequence
  source: /note="Description of Artificial Sequence: Synthetic oligonucleotide"
gguauguuccugcuucaucuu

SEQ ID NO: 58 - RNA, 21 nt, Artificial Sequence
  source: /note="Description of Artificial Sequence: Synthetic oligonucleotide"
gaugaagcaggaacauaccuu

SEQ ID NO: 59 - RNA, 21 nt, Artificial Sequence
  source: /note="Description of Artificial Sequence: Synthetic oligonucleotide"
guauguuccugcuucauccuu

SEQ ID NO: 60 - RNA, 21 nt, Artificial Sequence
  source: /note="Description of Artificial Sequence: Synthetic oligonucleotide"
ggaugaagcaggaacauacuu

SEQ ID NO: 61 - RNA, 21 nt, Artificial Sequence
  source: /note="Description of Artificial Sequence: Synthetic oligonucleotide"
uauguuccugcuucaucccuu

SEQ ID NO: 62 - RNA, 21 nt, Artificial Sequence
  source: /note="Description of Artificial Sequence: Synthetic oligonucleotide"
gggaugaagcaggaacauauu

SEQ ID NO: 63 - RNA, 21 nt, Artificial Sequence
  source: /note="Description of Artificial Sequence: Synthetic oligonucleotide"
auguuccugcuucauccccuu

SEQ ID NO: 64 - RNA, 21 nt, Artificial Sequence
  source: /note="Description of Artificial Sequence: Synthetic oligonucleotide"
ggggaugaagcaggaacauuu

SEQ ID NO: 65 - RNA, 21 nt, Artificial Sequence
  source: /note="Description of Artificial Sequence: Synthetic oligonucleotide"
uguuccugcuucauccccuuu

SEQ ID NO: 66 - RNA, 21 nt, Artificial Sequence
  source: /note="Description of Artificial Sequence: Synthetic oligonucleotide"
aggggaugaagcaggaacauu

SEQ ID NO: 67 - RNA, 21 nt, Artificial Sequence
  source: /note="Description of Artificial Sequence: Synthetic oligonucleotide"
guuccugcuucauccccuuuu

SEQ ID NO: 68 - RNA, 21 nt, Artificial Sequence
  source: /note="Description of Artificial Sequence: Synthetic oligonucleotide"
aaggggaugaagcaggaacuu

SEQ ID NO: 69 - RNA, 21 nt, Artificial Sequence
  source: /note="Description of Artificial Sequence: Synthetic oligonucleotide"
uuccugcuucauccccuucuu

SEQ ID NO: 70 - RNA, 21 nt, Artificial Sequence
  source: /note="Description of Artificial Sequence: Synthetic oligonucleotide"
gaaggggaugaagcaggaauu

SEQ ID NO: 71 - RNA, 21 nt, Artificial Sequence
  source: /note="Description of Artificial Sequence: Synthetic oligonucleotide"
uccugcuucauccccuucuuu

SEQ ID NO: 72 - RNA, 21 nt, Artificial Sequence
  source: /note="Description of Artificial Sequence: Synthetic oligonucleotide"
agaaggggaugaagcaggauu

SEQ ID NO: 73 - RNA, 21 nt, Artificial Sequence
  source: /note="Description of Artificial Sequence: Synthetic oligonucleotide"
ccugcuucauccccuucuauu

SEQ ID NO: 74 - RNA, 21 nt, Artificial Sequence
  source: /note="Description of Artificial Sequence: Synthetic oligonucleotide"
uagaaggggaugaagcagguu

SEQ ID NO: 75 - RNA, 21 nt, Artificial Sequence
  source: /note="Description of Artificial Sequence: Synthetic oligonucleotide"
cugcuucauccccuucuacuu

SEQ ID NO: 76 - RNA, 21 nt, Artificial Sequence
  source: /note="Description of Artificial Sequence: Synthetic oligonucleotide"
guagaaggggaugaagcaguu

SEQ ID NO: 77 - RNA, 21 nt, Artificial Sequence
  source: /note="Description of Artificial Sequence: Synthetic oligonucleotide"
ugcuucauccccuucuacauu

SEQ ID NO: 78 - RNA, 21 nt, Artificial Sequence
  source: /note="Description of Artificial Sequence: Synthetic oligonucleotide"
uguagaaggggaugaagcauu

SEQ ID NO: 79 - RNA, 21 nt, Artificial Sequence
  source: /note="Description of Artificial Sequence: Synthetic oligonucleotide"
uucauccccuucuacaguguu

SEQ ID NO: 80 - RNA, 21 nt, Artificial Sequence
  source: /note="Description of Artificial Sequence: Synthetic oligonucleotide"
cacuguagaaggggaugaauu

SEQ ID NO: 81 - RNA, 21 nt, Artificial Sequence
  source: /note="Description of Artificial Sequence: Synthetic oligonucleotide"
ucauccccuucuacagugguu

SEQ ID NO: 82 - RNA, 21 nt, Artificial Sequence
  source: /note="Description of Artificial Sequence: Synthetic oligonucleotide"
ccacuguagaaggggaugauu

SEQ ID NO: 83 - RNA, 21 nt, Artificial Sequence
  source: /note="Description of Artificial Sequence: Synthetic oligonucleotide"
cauccccuucuacaguggcuu

SEQ ID NO: 84 - RNA, 21 nt, Artificial Sequence
  source: /note="Description of Artificial Sequence: Synthetic oligonucleotide"
gccacuguagaaggggauguu

SEQ ID NO: 85 - RNA, 21 nt, Artificial Sequence
  source: /note="Description of Artificial Sequence: Synthetic oligonucleotide"
uccccuucuacaguggccuuu

SEQ ID NO: 86 - RNA, 21 nt, Artificial Sequence
  source: /note="Description of Artificial Sequence: Synthetic oligonucleotide"
aggccacuguagaaggggauu

SEQ ID NO: 87 - RNA, 21 nt, Artificial Sequence
  source: /note="Description of Artificial Sequence: Synthetic oligonucleotide"
gaucaggacccgagccgauuu

SEQ ID NO: 88 - RNA, 21 nt, Artificial Sequence
  source: /note="Description of Artificial Sequence: Synthetic oligonucleotide"
aucggcucggguccugaucuu

SEQ ID NO: 89 - RNA, 21 nt, Artificial Sequence
  source: /note="Description of Artificial Sequence: Synthetic oligonucleotide"
ugggcuucuaccacgucguuu

SEQ ID NO: 90 - RNA, 21 nt, Artificial Sequence
  source: /note="Description of Artificial Sequence: Synthetic oligonucleotide"
acgacgugguagaagcccauu

SEQ ID NO: 91 - RNA, 21 nt, Artificial Sequence
  source: /note="Description of Artificial Sequence: Synthetic oligonucleotide"
gagcgagcacgccccgcauuu

SEQ ID NO: 92 - RNA, 21 nt, Artificial Sequence
  source: /note="Description of Artificial Sequence: Synthetic oligonucleotide"
augcggggcgugcucgcucuu

SEQ ID NO: 93 - RNA, 21 nt, Artificial Sequence
  source: /note="Description of Artificial Sequence: Synthetic oligonucleotide"
ugcacugcgucggcguccuuu

SEQ ID NO: 94 - RNA, 21 nt, Artificial Sequence
  source: /note="Description of Artificial Sequence: Synthetic oligonucleotide"
aggacgccgacgcagugcauu

SEQ ID NO: 95 - RNA, 21 nt, Artificial Sequence
  source: /note="Description of Artificial Sequence: Synthetic oligonucleotide"
uggagcagacucugcagguuu

SEQ ID NO: 96 - RNA, 21 nt, Artificial Sequence
  source: /note="Description of Artificial Sequence: Synthetic oligonucleotide"
accugcagagucugcuccauu

SEQ ID NO: 97 - RNA, 21 nt, Artificial Sequence
  source: /note="Description of Artificial Sequence: Synthetic oligonucleotide"
ugcagguccucucagaucuuu

SEQ ID NO: 98 - RNA, 21 nt, Artificial Sequence
  source: /note="Description of Artificial Sequence: Synthetic oligonucleotide"
agaucugagaggaccugcauu

SEQ ID NO: 99 - RNA, 21 nt, Artificial Sequence
  source: /note="Description of Artificial Sequence: Synthetic oligonucleotide"
cccggccaauguccaccauuu

SEQ ID NO: 100 - RNA, 21 nt, Artificial Sequence
  source: /note="Description of Artificial Sequence: Synthetic oligonucleotide"
augguggacauuggccggguu

SEQ ID NO: 101 - RNA, 21 nt, Artificial Sequence
  source: /note="Description of Artificial Sequence: Synthetic oligonucleotide"
uucuacaguggccuuaucuuu

SEQ ID NO: 102 - RNA, 21 nt, Artificial Sequence
  source: /note="Description of Artificial Sequence: Synthetic oligonucleotide"
agauaaggccacuguagaauu

SEQ ID NO: 103 - RNA, 21 nt, Artificial Sequence
  source: /note="Description of Artificial Sequence: Synthetic oligonucleotide"
ucuacaguggccuuauccuuu

SEQ ID NO: 104 - RNA, 21 nt, Artificial Sequence
  source: /note="Description of Artificial Sequence: Synthetic oligonucleotide"
aggauaaggccacuguagauu

SEQ ID NO: 105 - RNA, 21 nt, Artificial Sequence
  source: /note="Description of Artificial Sequence: Synthetic oligonucleotide"
cuuccuucagaggcgugcuuu

SEQ ID NO: 106 - RNA, 21 nt, Artificial Sequence
  source: /note="Description of Artificial Sequence: Synthetic oligonucleotide"
agcacgccucugaaggaaguu

SEQ ID NO: 107 - RNA, 21 nt, Artificial Sequence
  source: /note="Description of Artificial Sequence: Synthetic oligonucleotide"
uuccuucagaggcgugcgauu

SEQ ID NO: 108 - RNA, 21 nt, Artificial Sequence
  source: /note="Description of Artificial Sequence: Synthetic oligonucleotide"
ucgcacgccucugaaggaauu

SEQ ID NO: 109 - RNA, 21 nt, Artificial Sequence
  source: /note="Description of Artificial Sequence: Synthetic oligonucleotide"
gcgugcgauauguggauguuu

SEQ ID NO: 110 - RNA, 21 nt, Artificial Sequence
  source: /note="Description of Artificial Sequence: Synthetic oligonucleotide"
acauccacauaucgcacgcuu

SEQ ID NO: 111 - RNA, 21 nt, Artificial Sequence
  source: /note="Description of Artificial Sequence: Synthetic oligonucleotide"
cgugcgauauguggauggauu

SEQ ID NO: 112 - RNA, 21 nt, Artificial Sequence
  source: /note="Description of Artificial Sequence: Synthetic oligonucleotide"
uccauccacauaucgcacguu

SEQ ID NO: 113 - RNA, 21 nt, Artificial Sequence
  source: /note="Description of Artificial Sequence: Synthetic oligonucleotide"
uggauggaggagugagugauu

SEQ ID NO: 114 - RNA, 21 nt, Artificial Sequence
  source: /note="Description of Artificial Sequence: Synthetic oligonucleotide"
ucacucacuccuccauccauu

SEQ ID NO: 115 - RNA, 21 nt, Artificial Sequence
  source: /note="Description of Artificial Sequence: Synthetic oligonucleotide"
acguacccuucauugauguuu

SEQ ID NO: 116 - RNA, 21 nt, Artificial Sequence
  source: /note="Description of Artificial Sequence: Synthetic oligonucleotide"
acaucaaugaaggguacguuu

SEQ ID NO: 117 - RNA, 21 nt, Artificial Sequence
  source: /note="Description of Artificial Sequence: Synthetic oligonucleotide"
uggacaucaccaagcucauuu

SEQ ID NO: 118 - RNA, 21 nt, Artificial Sequence
  source: /note="Description of Artificial Sequence: Synthetic oligonucleotide"
augagcuuggugauguccauu

SEQ ID NO: 119 - RNA, 21 nt, Artificial Sequence
  source: /note="Description of Artificial Sequence: Synthetic oligonucleotide"
caccugcgucucagcaucuuu

SEQ ID NO: 120 - RNA, 21 nt, Artificial Sequence
  source: /note="Description of Artificial Sequence: Synthetic oligonucleotide"
agaugcugagacgcagguguu

SEQ ID NO: 121 - RNA, 21 nt, Artificial Sequence
  source: /note="Description of Artificial Sequence: Synthetic oligonucleotide"
accugcgucucagcauccuuu

SEQ ID NO: 122 - RNA, 21 nt, Artificial Sequence
  source: /note="Description of Artificial Sequence: Synthetic oligonucleotide"
aggaugcugagacgcagguuu

SEQ ID NO: 123 - RNA, 21 nt, Artificial Sequence
  source: /note="Description of Artificial Sequence: Synthetic oligonucleotide"
ccagagacuggugacauguuu

SEQ ID NO: 124 - RNA, 21 nt, Artificial Sequence
  source: /note="Description of Artificial Sequence: Synthetic oligonucleotide"
acaugucaccagucucugguu

SEQ ID NO: 125 - RNA, 21 nt, Artificial Sequence
  source: /note="Description of Artificial Sequence: Synthetic oligonucleotide"
auggcuuccagauaugccuuu

SEQ ID NO: 126 - RNA, 21 nt, Artificial Sequence
  source: /note="Description of Artificial Sequence: Synthetic oligonucleotide"
aggcauaucuggaagccauuu

SEQ ID NO: 127 - RNA, 21 nt, Artificial Sequence
  source: /note="Description of Artificial Sequence: Synthetic oligonucleotide"
ccgccuccaggucccaaauuu

SEQ ID NO: 128 - RNA, 21 nt, Artificial Sequence
  source: /note="Description of Artificial Sequence: Synthetic oligonucleotide"
auuugggaccuggaggcgguu

SEQ ID NO: 129 - RNA, 21 nt, Artificial Sequence
  source: /note="Description of Artificial Sequence: Synthetic oligonucleotide"
uaccugcuggugcugagguuu

SEQ ID NO: 130 - RNA, 21 nt, Artificial Sequence
  source: /note="Description of Artificial Sequence: Synthetic oligonucleotide"
accucagcaccagcagguauu

SEQ ID NO: 131 - RNA, 21 nt, Artificial Sequence
  source: /note="Description of Artificial Sequence: Synthetic oligonucleotide"
accugcuggugcugaggguuu

SEQ ID NO: 132 - RNA, 21 nt, Artificial Sequence
  source: /note="Description of Artificial Sequence: Synthetic oligonucleotide"
acccucagcaccagcagguuu

SEQ ID NO: 133 - RNA, 21 nt, Artificial Sequence
  source: /note="Description of Artificial Sequence: Synthetic oligonucleotide"
cucuccaccuuucccaguuuu

SEQ ID NO: 134 - RNA, 21 nt, Artificial Sequence
  source: /note="Description of Artificial Sequence: Synthetic oligonucleotide"
aacugggaaagguggagaguu

SEQ ID NO: 135 - RNA, 21 nt, Artificial Sequence
  source: /note="Description of Artificial Sequence: Synthetic oligonucleotide"
uuuuucaccuaacuaaaauuu

SEQ ID NO: 136 - RNA, 21 nt, Artificial Sequence
  source: /note="Description of Artificial Sequence: Synthetic oligonucleotide"
auuuuaguuaggugaaaaauu

SEQ ID NO: 137 - RNA, 21 nt, Artificial Sequence
  source: /note="Description of Artificial Sequence: Synthetic oligonucleotide"
cggccaauguccaccagcuuu

SEQ ID NO: 138 - RNA, 21 nt, Artificial Sequence
  source: /note="Description of Artificial Sequence: Synthetic oligonucleotide"
agcugguggacauuggccguu

SEQ ID NO: 139 - RNA, 21 nt, Artificial Sequence
  source: /note="Description of Artificial Sequence: Synthetic oligonucleotide"
gguccagccugaacuucuuuu

SEQ ID NO: 140 - RNA, 21 nt, Artificial Sequence
  source: /note="Description of Artificial Sequence: Synthetic oligonucleotide"
aagaaguucaggcuggaccuu

SEQ ID NO: 141 - RNA, 21 nt, Artificial Sequence
  source: /note="Description of Artificial Sequence: Synthetic oligonucleotide"
gcggcuuccugggcuucuauu

SEQ ID NO: 142 - RNA, 21 nt, Artificial Sequence
  source: /note="Description of Artificial Sequence: Synthetic oligonucleotide"
uagaagcccaggaagccgcuu

SEQ ID NO: 143 - RNA, 21 nt, Artificial Sequence
  source: /note="Description of Artificial Sequence: Synthetic oligonucleotide"
gugacaacguacccuucauuu

SEQ ID NO: 144 - RNA, 21 nt, Artificial Sequence
  source: /note="Description of Artificial Sequence: Synthetic oligonucleotide"
augaaggguacguugucacuu

SEQ ID NO: 145 - RNA, 21 nt, Artificial Sequence
  source: /note="Description of Artificial Sequence: Synthetic oligonucleotide"
gguauguuccugcuucauguu

SEQ ID NO: 146 - RNA, 21 nt, Artificial Sequence
  source: /note="Description of Artificial Sequence: Synthetic oligonucleotide"
caugaagcaggaacauaccuu

SEQ ID NO: 147 - RNA, 21 nt, Artificial Sequence
  source: /note="Description of Artificial Sequence: Synthetic oligonucleotide"
guauguuccugcuucaugcuu

SEQ ID NO: 148 - RNA, 21 nt, Artificial Sequence
  source: /note="Description of Artificial Sequence: Synthetic oligonucleotide"
gcaugaagcaggaacauacuu

SEQ ID NO: 149 - RNA, 21 nt, Artificial Sequence
  source: /note="Description of Artificial Sequence: Synthetic oligonucleotide"
uguuccugcuucaugcccuuu

SEQ ID NO: 150 - RNA, 21 nt, Artificial Sequence
  source: /note="Description of Artificial Sequence: Synthetic oligonucleotide"
agggcaugaagcaggaacauu

SEQ ID NO: 151 - RNA, 21 nt, Artificial Sequence
  source: /note="Description of Artificial Sequence: Synthetic oligonucleotide"
guuccugcuucaugcccuuuu

SEQ ID NO: 152 - RNA, 21 nt, Artificial Sequence
  source: /note="Description of Artificial Sequence: Synthetic oligonucleotide"
aagggcaugaagcaggaacuu

SEQ ID NO: 153 - RNA, 21 nt, Artificial Sequence
  source: /note="Description of Artificial Sequence: Synthetic oligonucleotide"
ccugcuucaugcccuucuauu

SEQ ID NO: 154 - RNA, 21 nt, Artificial Sequence
  source: /note="Description of Artificial Sequence: Synthetic oligonucleotide"
uagaagggcaugaagcagguu

SEQ ID NO: 155 - RNA, 21 nt, Artificial Sequence
  source: /note="Description of Artificial Sequence: Synthetic oligonucleotide"
gcuucaugcccuucuacaguu

SEQ ID NO: 156 - RNA, 21 nt, Artificial Sequence
  source: /note="Description of Artificial Sequence: Synthetic oligonucleotide"
cuguagaagggcaugaagcuu

SEQ ID NO: 157 - RNA, 21 nt, Artificial Sequence
  source: /note="Description of Artificial Sequence: Synthetic oligonucleotide"
cuucaugcccuucuacaguuu

SEQ ID NO: 158 - RNA, 21 nt, Artificial Sequence
  source: /note="Description of Artificial Sequence: Synthetic oligonucleotide"
acuguagaagggcaugaaguu

SEQ ID NO: 159 - RNA, 21 nt, Artificial Sequence
  source: /note="Description of Artificial Sequence: Synthetic oligonucleotide"
uucaugcccuucuacaguguu

SEQ ID NO: 160 - RNA, 21 nt, Artificial Sequence
  source: /note="Description of Artificial Sequence: Synthetic oligonucleotide"
cacuguagaagggcaugaauu

SEQ ID NO: 161 - RNA, 21 nt, Artificial Sequence
  source: /note="Description of Artificial Sequence: Synthetic oligonucleotide"
auggcuuccagauaugccuuu

SEQ ID NO: 162 - RNA, 21 nt, Artificial Sequence
  source: /note="Description of Artificial Sequence: Synthetic oligonucleotide"
aggcauaucuggaagccauuu

SEQ ID NO: 163 - RNA, 21 nt, Artificial Sequence
  source: /note="Description of Artificial Sequence: Synthetic oligonucleotide"
augcccuucuacaguggccuu

SEQ ID NO: 164 - RNA, 21 nt, Artificial Sequence
  source: /note="Description of Artificial Sequence: Synthetic oligonucleotide"
ggccacuguagaagggcauuu

SEQ ID NO: 165 - RNA, 21 nt, Artificial Sequence
  source: /note="Description of Artificial Sequence: Synthetic oligonucleotide"
gcuucaugcccuucuacauuu

SEQ ID NO: 166 - RNA, 21 nt, Artificial Sequence
  source: /note="Description of Artificial Sequence: Synthetic oligonucleotide"
auguagaagggcaugaagcuu

SEQ ID NO: 167 - RNA, 21 nt, Artificial Sequence
  source: /note="Description of Artificial Sequence: Synthetic oligonucleotide"
gggcaauaaaguaccugcuuu

SEQ ID NO: 168 - RNA, 21 nt, Artificial Sequence
  source: /note="Description of Artificial Sequence: Synthetic oligonucleotide"
agcagguacuuuauugcccuu

SEQ ID NO: 169 - RNA, 21 nt, Artificial Sequence
  source: /note="Description of Artificial Sequence: Synthetic oligonucleotide"
cggccaauguccaccagcuuu

SEQ ID NO: 170 - RNA, 21 nt, Artificial Sequence
  source: /note="Description of Artificial Sequence: Synthetic oligonucleotide"
agcugguggacauuggccguu

SEQ ID NO: 171 - RNA, 21 nt, Artificial Sequence
  source: /note="Description of Artificial Sequence: Synthetic oligonucleotide"
gguccagccugaacuucuuuu

SEQ ID NO: 172 - RNA, 21 nt, Artificial Sequence
  source: /note="Description of Artificial Sequence: Synthetic oligonucleotide"
aagaaguucaggcuggaccuu

SEQ ID NO: 173 - RNA, 21 nt, Artificial Sequence
  source: /note="Description of Artificial Sequence: Synthetic oligonucleotide"
gcuucauccccuucuacaguu

SEQ ID NO: 174 - RNA, 21 nt, Artificial Sequence
  source: /note="Description of Artificial Sequence: Synthetic oligonucleotide"
cuguagaaggggaugaagcuu

SEQ ID NO: 175 - RNA, 21 nt, Artificial Sequence
  source: /note="Description of Artificial Sequence: Synthetic oligonucleotide"
gcggcuuccugggcuucuauu

SEQ ID NO: 176 - RNA, 21 nt, Artificial Sequence
  source: /note="Description of Artificial Sequence: Synthetic oligonucleotide"
uagaagcccaggaagccgcuu

SEQ ID NO: 177 - RNA, 21 nt, Artificial Sequence
  source: /note="Description of Artificial Sequence: Synthetic oligonucleotide"
gccucugagcugaguugguuu

SEQ ID NO: 178 - RNA, 21 nt, Artificial Sequence
  source: /note="Description of Artificial Sequence: Synthetic oligonucleotide"
accaacucagcucagaggcuu

SEQ ID NO: 179 - RNA, 21 nt, Artificial Sequence
  source: /note="Description of Artificial Sequence: Synthetic oligonucleotide"
gugacaacguacccuucauuu

SEQ ID NO: 180 - RNA, 21 nt, Artificial Sequence
  source: /note="Description of Artificial Sequence: Synthetic oligonucleotide"
augaaggguacguugucacuu

SEQ ID NO: 181 - RNA, 21 nt, Artificial Sequence
  source: /note="Description of Artificial Sequence: Synthetic oligonucleotide"
cccgccuccaggucccaaauu

SEQ ID NO: 182 - RNA, 21 nt, Artificial Sequence
  source: /note="Description of Artificial Sequence: Synthetic oligonucleotide"
uuugggaccuggaggcggguu

SEQ ID NO: 183 - RNA, 21 nt, Artificial Sequence
  source: /note="Description of Artificial Sequence: Synthetic oligonucleotide"
cuucauccccuucuacaguuu

SEQ ID NO: 184 - RNA, 21 nt, Artificial Sequence
  source: /note="Description of Artificial Sequence: Synthetic oligonucleotide"
acuguagaaggggaugaaguu

SEQ ID NO: 185 - RNA, 21 nt, Artificial Sequence
  source: /note="Description of Artificial Sequence: Synthetic oligonucleotide"
gguauguuccugcuucauguu

SEQ ID NO: 186 - RNA, 21 nt, Artificial Sequence
  source: /note="Description of Artificial Sequence: Synthetic oligonucleotide"
caugaagcaggaacauaccuu

SEQ ID NO: 187 - RNA, 21 nt, Artificial Sequence
  source: /note="Description of Artificial Sequence: Synthetic oligonucleotide"
guauguuccugcuucaugcuu

SEQ ID NO: 188 - RNA, 21 nt, Artificial Sequence
  source: /note="Description of Artificial Sequence: Synthetic oligonucleotide"
gcaugaagcaggaacauacuu

SEQ ID NO: 189 - RNA, 21 nt, Artificial Sequence
  source: /note="Description of Artificial Sequence: Synthetic oligonucleotide"
uauguuccugcuucaugccuu

SEQ ID NO: 190 - RNA, 21 nt, Artificial Sequence
  source: /note="Description of Artificial Sequence: Synthetic oligonucleotide"
ggcaugaagcaggaacauauu

SEQ ID NO: 191 - RNA, 21 nt, Artificial Sequence
  source: /note="Description of Artificial Sequence: Synthetic oligonucleotide"
auguuccugcuucaugcccuu

SEQ ID NO: 192 - RNA, 21 nt, Artificial Sequence
  source: /note="Description of Artificial Sequence: Synthetic oligonucleotide"
gggcaugaagcaggaacauuu

SEQ ID NO: 193 - RNA, 21 nt, Artificial Sequence
  source: /note="Description of Artificial Sequence: Synthetic oligonucleotide"
uguuccugcuucaugcccuuu

SEQ ID NO: 194 - RNA, 21 nt, Artificial Sequence
  source: /note="Description of Artificial Sequence: Synthetic oligonucleotide"
agggcaugaagcaggaacauu

SEQ ID NO: 195 - RNA, 21 nt, Artificial Sequence
  source: /note="Description of Artificial Sequence: Synthetic oligonucleotide"
guuccugcuucaugcccuuuu

SEQ ID NO: 196 - RNA, 21 nt, Artificial Sequence
  source: /note="Description of Artificial Sequence: Synthetic oligonucleotide"
aagggcaugaagcaggaacuu

SEQ ID NO: 197 - RNA, 21 nt, Artificial Sequence
  source: /note="Description of Artificial Sequence: Synthetic oligonucleotide"
uuccugcuucaugcccuucuu

SEQ ID NO: 198 - RNA, 21 nt, Artificial Sequence
  source: /note="Description of Artificial Sequence: Synthetic oligonucleotide"
gaagggcaugaagcaggaauu

SEQ ID NO: 199 - RNA, 21 nt, Artificial Sequence
  source: /note="Description of Artificial Sequence: Synthetic oligonucleotide"
uccugcuucaugcccuucuuu

SEQ ID NO: 200 - RNA, 21 nt, Artificial Sequence
  source: /note="Description of Artificial Sequence: Synthetic oligonucleotide"
agaagggcaugaagcaggauu

SEQ ID NO: 201 - RNA, 21 nt, Artificial Sequence
  source: /note="Description of Artificial Sequence: Synthetic oligonucleotide"
ccugcuucaugcccuucuauu

SEQ ID NO: 202 - RNA, 21 nt, Artificial Sequence
  source: /note="Description of Artificial Sequence: Synthetic oligonucleotide"
uagaagggcaugaagcagguu

SEQ ID NO: 203 - RNA, 21 nt, Artificial Sequence
  source: /note="Description of Artificial Sequence: Synthetic oligonucleotide"
cugcuucaugcccuucuacuu

SEQ ID NO: 204 - RNA, 21 nt, Artificial Sequence
  source: /note="Description of Artificial Sequence: Synthetic oligonucleotide"
guagaagggcaugaagcaguu

SEQ ID NO: 205 - RNA, 21 nt, Artificial Sequence
  source: /note="Description of Artificial Sequence: Synthetic oligonucleotide"
ugcuucaugcccuucuacauu

SEQ ID NO: 206 - RNA, 21 nt, Artificial Sequence
  source: /note="Description of Artificial Sequence: Synthetic oligonucleotide"
uguagaagggcaugaagcauu

SEQ ID NO: 207 - RNA, 21 nt, Artificial Sequence
  source: /note="Description of Artificial Sequence: Synthetic oligonucleotide"
gcuucaugcccuucuacaguu

SEQ ID NO: 208 - RNA, 21 nt, Artificial Sequence
  source: /note="Description of Artificial Sequence: Synthetic oligonucleotide"
cuguagaagggcaugaagcuu

SEQ ID NO: 209 - RNA, 21 nt, Artificial Sequence
  source: /note="Description of Artificial Sequence: Synthetic oligonucleotide"
cuucaugcccuucuacaguuu

SEQ ID NO: 210 - RNA, 21 nt, Artificial Sequence
  source: /note="Description of Artificial Sequence: Synthetic oligonucleotide"
acuguagaagggcaugaaguu

SEQ ID NO: 211 - RNA, 21 nt, Artificial Sequence
  source: /note="Description of Artificial Sequence: Synthetic oligonucleotide"
uucaugcccuucuacaguguu

SEQ ID NO: 212 - RNA, 21 nt, Artificial Sequence
  source: /note="Description of Artificial Sequence: Synthetic oligonucleotide"
cacuguagaagggcaugaauu

SEQ ID NO: 213 - RNA, 21 nt, Artificial Sequence
  source: /note="Description of Artificial Sequence: Synthetic oligonucleotide"
ucaugcccuucuacagugguu

SEQ ID NO: 214 - RNA, 21 nt, Artificial Sequence
  source: /note="Description of Artificial Sequence: Synthetic oligonucleotide"
ccacuguagaagggcaugauu

SEQ ID NO: 215 - RNA, 21 nt, Artificial Sequence
  source: /note="Description of Artificial Sequence: Synthetic oligonucleotide"
caugcccuucuacaguggcuu

SEQ ID NO: 216 - RNA, 21 nt, Artificial Sequence
  source: /note="Description of Artificial Sequence: Synthetic oligonucleotide"
gccacuguagaagggcauguu

SEQ ID NO: 217 - RNA, 21 nt, Artificial Sequence
  source: /note="Description of Artificial Sequence: Synthetic oligonucleotide"
augcccuucuacaguggccuu

SEQ ID NO: 218 - RNA, 21 nt, Artificial Sequence
  source: /note="Description of Artificial Sequence: Synthetic oligonucleotide"
ggccacuguagaagggcauuu

SEQ ID NO: 219 - RNA, 21 nt, Artificial Sequence
  source: /note="Description of Artificial Sequence: Synthetic oligonucleotide"
ugcccuucuacaguggccuuu

SEQ ID NO: 220 - RNA, 21 nt, Artificial Sequence
  source: /note="Description of Artificial Sequence: Synthetic oligonucleotide"
aggccacuguagaagggcauu

SEQ ID NO: 221 - RNA, 21 nt, Artificial Sequence
  source: /note="Description of Artificial Sequence: Synthetic oligonucleotide"
gcccuucuacaguggccuuuu

SEQ ID NO: 222 - RNA, 21 nt, Artificial Sequence
  source: /note="Description of Artificial Sequence: Synthetic oligonucleotide"
aaggccacuguagaagggcuu

SEQ ID NO: 223 - RNA, 21 nt, Artificial Sequence
  source: /note="Description of Artificial Sequence: Synthetic oligonucleotide"
gguauguuccugcuucaucuu

SEQ ID NO: 224 - RNA, 21 nt, Artificial Sequence
  source: /note="Description of Artificial Sequence: Synthetic oligonucleotide"
gaugaagcaggaacauaccuu

SEQ ID NO: 225 - RNA, 21 nt, Artificial Sequence
  source: /note="Description of Artificial Sequence: Synthetic oligonucleotide"
guauguuccugcuucauccuu

SEQ ID NO: 226 - RNA, 21 nt, Artificial Sequence
  source: /note="Description of Artificial Sequence: Synthetic oligonucleotide"
ggaugaagcaggaacauacuu

SEQ ID NO: 227 - RNA, 21 nt, Artificial Sequence
  source: /note="Description of Artificial Sequence: Synthetic oligonucleotide"
uauguuccugcuucaucccuu

SEQ ID NO: 228 - RNA, 21 nt, Artificial Sequence
  source: /note="Description of Artificial Sequence: Synthetic oligonucleotide"
gggaugaagcaggaacauauu

SEQ ID NO: 229 - RNA, 21 nt, Artificial Sequence
  source: /note="Description of Artificial Sequence: Synthetic oligonucleotide"
auguuccugcuucauccccuu

SEQ ID NO: 230 - RNA, 21 nt, Artificial Sequence
  source: /note="Description of Artificial Sequence: Synthetic oligonucleotide"
ggggaugaagcaggaacauuu

SEQ ID NO: 231 - RNA, 21 nt, Artificial Sequence
  source: /note="Description of Artificial Sequence: Synthetic oligonucleotide"
uguuccugcuucauccccuuu

SEQ ID NO: 232 - RNA, 21 nt, Artificial Sequence
  source: /note="Description of Artificial Sequence: Synthetic oligonucleotide"
aggggaugaagcaggaacauu

SEQ ID NO: 233 - RNA, 21 nt, Artificial Sequence
  source: /note="Description of Artificial Sequence: Synthetic oligonucleotide"
guuccugcuucauccccuuuu

SEQ ID NO: 234 - RNA, 21 nt, Artificial Sequence
  source: /note="Description of Artificial Sequence: Synthetic oligonucleotide"
aaggggaugaagcaggaacuu

SEQ ID NO: 235 - RNA, 21 nt, Artificial Sequence
  source: /note="Description of Artificial Sequence: Synthetic oligonucleotide"
uuccugcuucauccccuucuu

SEQ ID NO: 236 - RNA, 21 nt, Artificial Sequence
  source: /note="Description of Artificial Sequence: Synthetic oligonucleotide"
gaaggggaugaagcaggaauu

SEQ ID NO: 237 - RNA, 21 nt, Artificial Sequence
  source: /note="Description of Artificial Sequence: Synthetic oligonucleotide"
uccugcuucauccccuucuuu

SEQ ID NO: 238 - RNA, 21 nt, Artificial Sequence
  source: /note="Description of Artificial Sequence: Synthetic oligonucleotide"
agaaggggaugaagcaggauu

SEQ ID NO: 239 - RNA, 21 nt, Artificial Sequence
  source: /note="Description of Artificial Sequence: Synthetic oligonucleotide"
ccugcuucauccccuucuauu

SEQ ID NO: 240 - RNA, 21 nt, Artificial Sequence
  source: /note="Description of Artificial Sequence: Synthetic oligonucleotide"
uagaaggggaugaagcagguu

SEQ ID NO: 241 - RNA, 21 nt, Artificial Sequence
  source: /note="Description of Artificial Sequence: Synthetic oligonucleotide"
cugcuucauccccuucuacuu

SEQ ID NO: 242 - RNA, 21 nt, Artificial Sequence
  source: /note="Description of Artificial Sequence: Synthetic oligonucleotide"
guagaaggggaugaagcaguu

SEQ ID NO: 243 - RNA, 21 nt, Artificial Sequence
  source: /note="Description of Artificial Sequence: Synthetic oligonucleotide"
ugcuucauccccuucuacauu

SEQ ID NO: 244 - RNA, 21 nt, Artificial Sequence
  source: /note="Description of Artificial Sequence: Synthetic oligonucleotide"
uguagaaggggaugaagcauu

SEQ ID NO: 245 - RNA, 21 nt, Artificial Sequence
  source: /note="Description of Artificial Sequence: Synthetic oligonucleotide"
uucauccccuucuacaguguu

SEQ ID NO: 246 - RNA, 21 nt, Artificial Sequence
  source: /note="Description of Artificial Sequence: Synthetic oligonucleotide"
cacuguagaaggggaugaauu

SEQ ID NO: 247 - RNA, 21 nt, Artificial Sequence
  source: /note="Description of Artificial Sequence: Synthetic oligonucleotide"
ucauccccuucuacagugguu

SEQ ID NO: 248 - RNA, 21 nt, Artificial Sequence
  source: /note="Description of Artificial Sequence: Synthetic oligonucleotide"
ccacuguagaaggggaugauu

SEQ ID NO: 249 - RNA, 21 nt, Artificial Sequence
  source: /note="Description of Artificial Sequence: Synthetic oligonucleotide"
cauccccuucuacaguggcuu

SEQ ID NO: 250 - RNA, 21 nt, Artificial Sequence
  source: /note="Description of Artificial Sequence: Synthetic oligonucleotide"
gccacuguagaaggggauguu

SEQ ID NO: 251 - RNA, 21 nt, Artificial Sequence
  source: /note="Description of Artificial Sequence: Synthetic oligonucleotide"
uccccuucuacaguggccuuu

SEQ ID NO: 252 - RNA, 21 nt, Artificial Sequence
  source: /note="Description of Artificial Sequence: Synthetic oligonucleotide"
aggccacuguagaaggggauu

SEQ ID NO: 253 - RNA, 21 nt, Artificial Sequence
  source: /note="Description of Artificial Sequence: Synthetic oligonucleotide"
gaucaggacccgagccgauuu

SEQ ID NO: 254 - RNA, 21 nt, Artificial Sequence
  source: /note="Description of Artificial Sequence: Synthetic oligonucleotide"
aucggcucggguccugaucuu

SEQ ID NO: 255 - RNA, 21 nt, Artificial Sequence
  source: /note="Description of Artificial Sequence: Synthetic oligonucleotide"
ugggcuucuaccacgucguuu

SEQ ID NO: 256 - RNA, 21 nt, Artificial Sequence
  source: /note="Description of Artificial Sequence: Synthetic oligonucleotide"
acgacgugguagaagcccauu

SEQ ID NO: 257 - RNA, 21 nt, Artificial Sequence
  source: /note="Description of Artificial Sequence: Synthetic oligonucleotide"
gagcgagcacgccccgcauuu

SEQ ID NO: 258 - RNA, 21 nt, Artificial Sequence
  source: /note="Description of Artificial Sequence: Synthetic oligonucleotide"
augcggggcgugcucgcucuu

SEQ ID NO: 259 - RNA, 21 nt, Artificial Sequence
  source: /note="Description of Artificial Sequence: Synthetic oligonucleotide"
ugcacugcgucggcguccuuu

SEQ ID NO: 260 - RNA, 21 nt, Artificial Sequence
  source: /note="Description of Artificial Sequence: Synthetic oligonucleotide"
aggacgccgacgcagugcauu

SEQ ID NO: 261 - RNA, 21 nt, Artificial Sequence
  source: /note="Description of Artificial Sequence: Synthetic oligonucleotide"
uggagcagacucugcagguuu

SEQ ID NO: 262 - RNA, 21 nt, Artificial Sequence
  source: /note="Description of Artificial Sequence: Synthetic oligonucleotide"
accugcagagucugcuccauu

SEQ ID NO: 263 - RNA, 21 nt, Artificial Sequence
  source: /note="Description of Artificial Sequence: Synthetic oligonucleotide"
ugcagguccucucagaucuuu

SEQ ID NO: 264 - RNA, 21 nt, Artificial Sequence
  source: /note="Description of Artificial Sequence: Synthetic oligonucleotide"
agaucugagaggaccugcauu

SEQ ID NO: 265 - RNA, 21 nt, Artificial Sequence
  source: /note="Description of Artificial Sequence: Synthetic oligonucleotide"
cccggccaauguccaccauuu

SEQ ID NO: 266 - RNA, 21 nt, Artificial Sequence
  source: /note="Description of Artificial Sequence: Synthetic oligonucleotide"
augguggacauuggccggguu

SEQ ID NO: 267 - RNA, 21 nt, Artificial Sequence
  source: /note="Description of Artificial Sequence: Synthetic oligonucleotide"
uucuacaguggccuuaucuuu

SEQ ID NO: 268 - RNA, 21 nt, Artificial Sequence
  source: /note="Description of Artificial Sequence: Synthetic oligonucleotide"
agauaaggccacuguagaauu

SEQ ID NO: 269 - RNA, 21 nt, Artificial Sequence
  source: /note="Description of Artificial Sequence: Synthetic oligonucleotide"
ucuacaguggccuuauccuuu

SEQ ID NO: 270 - RNA, 21 nt, Artificial Sequence
  source: /note="Description of Artificial Sequence: Synthetic oligonucleotide"
aggauaaggccacuguagauu

SEQ ID NO: 271 - RNA, 21 nt, Artificial Sequence
  source: /note="Description of Artificial Sequence: Synthetic oligonucleotide"
cuuccuucagaggcgugcuuu

SEQ ID NO: 272 - RNA, 21 nt, Artificial Sequence
  source: /note="Description of Artificial Sequence: Synthetic oligonucleotide"
agcacgccucugaaggaaguu

SEQ ID NO: 273 - RNA, 21 nt, Artificial Sequence
  source: /note="Description of Artificial Sequence: Synthetic oligonucleotide"
uuccuucagaggcgugcgauu

SEQ ID NO: 274 - RNA, 21 nt, Artificial Sequence
  source: /note="Description of Artificial Sequence: Synthetic oligonucleotide"
ucgcacgccucugaaggaauu

SEQ ID NO: 275 - RNA, 21 nt, Artificial Sequence
  source: /note="Description of Artificial Sequence: Synthetic oligonucleotide"
gcgugcgauauguggauguuu

SEQ ID NO: 276 - RNA, 21 nt, Artificial Sequence
  source: /note="Description of Artificial Sequence: Synthetic oligonucleotide"
acauccacauaucgcacgcuu

SEQ ID NO: 277 - RNA, 21 nt, Artificial Sequence
  source: /note="Description of Artificial Sequence: Synthetic oligonucleotide"
cgugcgauauguggauggauu

SEQ ID NO: 278 - RNA, 21 nt, Artificial Sequence
  source: /note="Description of Artificial Sequence: Synthetic oligonucleotide"
uccauccacauaucgcacguu

SEQ ID NO: 279 - RNA, 21 nt, Artificial Sequence
  source: /note="Description of Artificial Sequence: Synthetic oligonucleotide"
uggauggaggagugagugauu

SEQ ID NO: 280 - RNA, 21 nt, Artificial Sequence
  source: /note="Description of Artificial Sequence: Synthetic oligonucleotide"
ucacucacuccuccauccauu

SEQ ID NO: 281 - RNA, 21 nt, Artificial Sequence
  source: /note="Description of Artificial Sequence: Synthetic oligonucleotide"
acguacccuucauugauguuu

SEQ ID NO: 282 - RNA, 21 nt, Artificial Sequence
  source: /note="Description of Artificial Sequence: Synthetic oligonucleotide"
acaucaaugaaggguacguuu

SEQ ID NO: 283 - RNA, 21 nt, Artificial Sequence
  source: /note="Description of Artificial Sequence: Synthetic oligonucleotide"
uggacaucaccaagcucauuu

SEQ ID NO: 284 - RNA, 21 nt, Artificial Sequence
  source: /note="Description of Artificial Sequence: Synthetic oligonucleotide"
augagcuuggugauguccauu

SEQ ID NO: 285 - RNA, 21 nt, Artificial Sequence
  source: /note="Description of Artificial Sequence: Synthetic oligonucleotide"
caccugcgucucagcaucuuu

SEQ ID NO: 286 - RNA, 21 nt, Artificial Sequence
  source: /note="Description of Artificial Sequence: Synthetic oligonucleotide"
agaugcugagacgcagguguu

SEQ ID NO: 287 - RNA, 21 nt, Artificial Sequence
  source: /note="Description of Artificial Sequence: Synthetic oligonucleotide"
accugcgucucagcauccuuu

SEQ ID NO: 288 - RNA, 21 nt, Artificial Sequence
  source: /note="Description of Artificial Sequence: Synthetic oligonucleotide"
aggaugcugagacgcagguuu

SEQ ID NO: 289 - RNA, 21 nt, Artificial Sequence
  source: /note="Description of Artificial Sequence: Synthetic oligonucleotide"
ccagagacuggugacauguuu

SEQ ID NO: 290 - RNA, 21 nt, Artificial Sequence
  source: /note="Description of Artificial Sequence: Synthetic oligonucleotide"
acaugucaccagucucugguu

SEQ ID NO: 291 - RNA, 21 nt, Artificial Sequence
  source: /note="Description of Artificial Sequence: Synthetic oligonucleotide"
auggcuuccagauaugccuuu

SEQ ID NO: 292 - RNA, 21 nt, Artificial Sequence
  source: /note="Description of Artificial Sequence: Synthetic oligonucleotide"
aggcauaucuggaagccauuu

SEQ ID NO: 293 - RNA, 21 nt, Artificial Sequence
  source: /note="Description of Artificial Sequence: Synthetic oligonucleotide"
ccgccuccaggucccaaauuu

SEQ ID NO: 294 - RNA, 21 nt, Artificial Sequence
  source: /note="Description of Artificial Sequence: Synthetic oligonucleotide"
auuugggaccuggaggcgguu

SEQ ID NO: 295 - RNA, 21 nt, Artificial Sequence
  source: /note="Description of Artificial Sequence: Synthetic oligonucleotide"
uaccugcuggugcugagguuu

SEQ ID NO: 296 - RNA, 21 nt, Artificial Sequence
  source: /note="Description of Artificial Sequence: Synthetic oligonucleotide"
accucagcaccagcagguauu

SEQ ID NO: 297 - RNA, 21 nt, Artificial Sequence
  source: /note="Description of Artificial Sequence: Synthetic oligonucleotide"
accugcuggugcugaggguuu

SEQ ID NO: 298 - RNA, 21 nt, Artificial Sequence
  source: /note="Description of Artificial Sequence: Synthetic oligonucleotide"
acccucagcaccagcagguuu

SEQ ID NO: 299 - RNA, 21 nt, Artificial Sequence
  source: /note="Description of Artificial Sequence: Synthetic oligonucleotide"
cucuccaccuuucccaguuuu

SEQ ID NO: 300 - RNA, 21 nt, Artificial Sequence
  source: /note="Description of Artificial Sequence: Synthetic oligonucleotide"
aacugggaaagguggagaguu

SEQ ID NO: 301 - RNA, 21 nt, Artificial Sequence
  source: /note="Description of Artificial Sequence: Synthetic oligonucleotide"
uuuuucaccuaacuaaaauuu

SEQ ID NO: 302 - RNA, 21 nt, Artificial Sequence
  source: /note="Description of Artificial Sequence: Synthetic oligonucleotide"
auuuuaguuaggugaaaaauu

SEQ ID NO: 303 - RNA, 21 nt, Artificial Sequence
  source: /note="Description of Artificial Sequence: Synthetic oligonucleotide"
cggccaauguccaccagcuuu

SEQ ID NO: 304 - RNA, 21 nt, Artificial Sequence
  source: /note="Description of Artificial Sequence: Synthetic oligonucleotide"
agcugguggacauuggccguu

SEQ ID NO: 305 - RNA, 21 nt, Artificial Sequence
  source: /note="Description of Artificial Sequence: Synthetic oligonucleotide"
gguccagccugaacuucuuuu

SEQ ID NO: 306 - RNA, 21 nt, Artificial Sequence
  source: /note="Description of Artificial Sequence: Synthetic oligonucleotide"
aagaaguucaggcuggaccuu

SEQ ID NO: 307 - RNA, 21 nt, Artificial Sequence
  source: /note="Description of Artificial Sequence: Synthetic oligonucleotide"
gcggcuuccugggcuucuauu

SEQ ID NO: 308 - RNA, 21 nt, Artificial Sequence
  source: /note="Description of Artificial Sequence: Synthetic oligonucleotide"
uagaagcccaggaagccgcuu

SEQ ID NO: 309 - RNA, 21 nt, Artificial Sequence
  source: /note="Description of Artificial Sequence: Synthetic oligonucleotide"
gugacaacguacccuucauuu

SEQ ID NO: 310 - RNA, 21 nt, Artificial Sequence
  source: /note="Description of Artificial Sequence: Synthetic oligonucleotide"
augaaggguacguugucacuu

SEQ ID NO: 311 - RNA, 21 nt, Artificial Sequence
  source: /note="Description of Artificial Sequence: Synthetic oligonucleotide"
gguauguuccugcuucauguu

SEQ ID NO: 312 - RNA, 21 nt, Artificial Sequence
  source: /note="Description of Artificial Sequence: Synthetic oligonucleotide"
caugaagcaggaacauaccuu

SEQ ID NO: 313 - RNA, 21 nt, Artificial Sequence
  source: /note="Description of Artificial Sequence: Synthetic oligonucleotide"
guauguuccugcuucaugcuu

SEQ ID NO: 314 - RNA, 21 nt, Artificial Sequence
  source: /note="Description of Artificial Sequence: Synthetic oligonucleotide"
gcaugaagcaggaacauacuu

SEQ ID NO: 315 - RNA, 21 nt, Artificial Sequence
  source: /note="Description of Artificial Sequence: Synthetic oligonucleotide"
uguuccugcuucaugcccuuu

SEQ ID NO: 316 - RNA, 21 nt, Artificial Sequence
  source: /note="Description of Artificial Sequence: Synthetic oligonucleotide"
agggcaugaagcaggaacauu

SEQ ID NO: 317 - RNA, 21 nt, Artificial Sequence
  source: /note="Description of Artificial Sequence: Synthetic oligonucleotide"
guuccugcuucaugcccuuuu

SEQ ID NO: 318 - RNA, 21 nt, Artificial Sequence
  source: /note="Description of Artificial Sequence: Synthetic oligonucleotide"
aagggcaugaagcaggaacuu

SEQ ID NO: 319 - RNA, 21 nt, Artificial Sequence
  source: /note="Description of Artificial Sequence: Synthetic oligonucleotide"
ccugcuucaugcccuucuauu

SEQ ID NO: 320 - RNA, 21 nt, Artificial Sequence
  source: /note="Description of Artificial Sequence: Synthetic oligonucleotide"
uagaagggcaugaagcagguu

SEQ ID NO: 321 - RNA, 21 nt, Artificial Sequence
  source: /note="Description of Artificial Sequence: Synthetic oligonucleotide"
gcuucaugcccuucuacaguu

SEQ ID NO: 322 - RNA, 21 nt, Artificial Sequence
  source: /note="Description of Artificial Sequence: Synthetic oligonucleotide"
cuguagaagggcaugaagcuu

SEQ ID NO: 323 - RNA, 21 nt, Artificial Sequence
  source: /note="Description of Artificial Sequence: Synthetic oligonucleotide"
cuucaugcccuucuacaguuu

SEQ ID NO: 324 - RNA, 21 nt, Artificial Sequence
  source: /note="Description of Artificial Sequence: Synthetic oligonucleotide"
acuguagaagggcaugaaguu

SEQ ID NO: 325 - RNA, 21 nt, Artificial Sequence
  source: /note="Description of Artificial Sequence: Synthetic oligonucleotide"
uucaugcccuucuacaguguu

SEQ ID NO: 326 - RNA, 21 nt, Artificial Sequence
  source: /note="Description of Artificial Sequence: Synthetic oligonucleotide"
cacuguagaagggcaugaauu

SEQ ID NO: 327 - RNA, 21 nt, Artificial Sequence
  source: /note="Description of Artificial Sequence: Synthetic oligonucleotide"
auggcuuccagauaugccuuu

SEQ ID NO: 328 - RNA, 21 nt, Artificial Sequence
  source: /note="Description of Artificial Sequence: Synthetic oligonucleotide"
aggcauaucuggaagccauuu

SEQ ID NO: 329 - RNA, 21 nt, Artificial Sequence
  source: /note="Description of Artificial Sequence: Synthetic oligonucleotide"
augcccuucuacaguggccuu

SEQ ID NO: 330 - RNA, 21 nt, Artificial Sequence
  source: /note="Description of Artificial Sequence: Synthetic oligonucleotide"
ggccacuguagaagggcauuu

SEQ ID NO: 331 - RNA, 21 nt, Artificial Sequence
  source: /note="Description of Artificial Sequence: Synthetic oligonucleotide"
gcuucaugcccuucuacauuu

SEQ ID NO: 332 - RNA, 21 nt, Artificial Sequence
  source: /note="Description of Artificial Sequence: Synthetic oligonucleotide"
auguagaagggcaugaagcuu

SEQ ID NO: 333 - RNA, 21 nt, Artificial Sequence
  source: /note="Description of Artificial Sequence: Synthetic oligonucleotide"
ggaaagacuguuccaaaaauu

SEQ ID NO: 334 - RNA, 21 nt, Artificial Sequence
  source: /note="Description of Artificial Sequence: Synthetic oligonucleotide"
uuuuuggaacagucuuuccuu

SEQ ID NO: 335 - RNA, 21 nt, Artificial Sequence
  source: /note="Description of Artificial Sequence: Synthetic oligonucleotide"
gguauguuccugcuucauguu

SEQ ID NO: 336 - RNA, 21 nt, Artificial Sequence
  source: /note="Description of Artificial Sequence: Synthetic oligonucleotide"
caugaagcaggaacauaccuu

SEQ ID NO: 337 - RNA, 21 nt, Artificial Sequence
  source: /note="Description of Artificial Sequence: Synthetic oligonucleotide"
guauguuccugcuucaugcuu

SEQ ID NO: 338 - RNA, 21 nt, Artificial Sequence
  source: /note="Description of Artificial Sequence: Synthetic oligonucleotide"
gcaugaagcaggaacauacuu

SEQ ID NO: 339 - RNA, 21 nt, Artificial Sequence
  source: /note="Description of Artificial Sequence: Synthetic oligonucleotide"
uguuccugcuucaugcccuuu

SEQ ID NO: 340 - RNA, 21 nt, Artificial Sequence
  source: /note="Description of Artificial Sequence: Synthetic oligonucleotide"
agggcaugaagcaggaacauu

SEQ ID NO: 341 - RNA, 21 nt, Artificial Sequence
  source: /note="Description of Artificial Sequence: Synthetic oligonucleotide"
gcuucaugcccuucuacaguu

SEQ ID NO: 342 - RNA, 21 nt, Artificial Sequence
  source: /note="Description of Artificial Sequence: Synthetic oligonucleotide"
cuguagaagggcaugaagcuu

SEQ ID NO: 343 - RNA, 21 nt, Artificial Sequence
  source: /note="Description of Artificial Sequence: Synthetic oligonucleotide"
cuucaugcccuucuacaguuu

SEQ ID NO: 344 - RNA, 21 nt, Artificial Sequence
  source: /note="Description of Artificial Sequence: Synthetic oligonucleotide"
acuguagaagggcaugaaguu

SEQ ID NO: 345 - RNA, 21 nt, Artificial Sequence
  source: /note="Description of Artificial Sequence: Synthetic oligonucleotide"
gcggcuuccugggcuucuauu

SEQ ID NO: 346 - RNA, 21 nt, Artificial Sequence
  source: /note="Description of Artificial Sequence: Synthetic oligonucleotide"
uagaagcccaggaagccgcuu

SEQ ID NO: 347 - RNA, 21 nt, Artificial Sequence
  source: /note="Description of Artificial Sequence: Synthetic oligonucleotide"
guuccugcuucaugcccuuuu

SEQ ID NO: 348 - RNA, 21 nt, Artificial Sequence
  source: /note="Description of Artificial Sequence: Synthetic oligonucleotide"
aagggcaugaagcaggaacuu

SEQ ID NO: 349 - RNA, 21 nt, Artificial Sequence
  source: /note="Description of Artificial Sequence: Synthetic oligonucleotide"
auggcuuccagauaugccuuu

SEQ ID NO: 350 - RNA, 21 nt, Artificial Sequence
  source: /note="Description of Artificial Sequence: Synthetic oligonucleotide"
aggcauaucuggaagccauuu

SEQ ID NO: 351 - RNA, 21 nt, Artificial Sequence
  source: /note="Description of Artificial Sequence: Synthetic oligonucleotide"
ccugcuucaugcccuucuauu

SEQ ID NO: 352 - RNA, 21 nt, Artificial Sequence
  source: /note="Description of Artificial Sequence: Synthetic oligonucleotide"
uagaagggcaugaagcagguu

SEQ ID NO: 353 - RNA, 21 nt, Artificial Sequence
  source: /note="Description of Artificial Sequence: Synthetic oligonucleotide"
uucaugcccuucuacaguuuu

SEQ ID NO: 354 - RNA, 21 nt, Artificial Sequence
  source: /note="Description of Artificial Sequence: Synthetic oligonucleotide"
aacuguagaagggcaugaauu

SEQ ID NO: 355 - RNA, 21 nt, Artificial Sequence
  source: /note="Description of Artificial Sequence: Synthetic oligonucleotide"
uucaugcccuucuacaguguu

SEQ ID NO: 356 - RNA, 21 nt, Artificial Sequence
  source: /note="Description of Artificial Sequence: Synthetic oligonucleotide"
cacuguagaagggcaugaauu

SEQ ID NO: 357 - RNA, 21 nt, Artificial Sequence
  source: /note="Description of Artificial Sequence: Synthetic oligonucleotide"
gcuucaugcccuucuacauuu

SEQ ID NO: 358 - RNA, 21 nt, Artificial Sequence
  source: /note="Description of Artificial Sequence: Synthetic oligonucleotide"
auguagaagggcaugaagcuu

SEQ ID NO: 359 - RNA, 21 nt, Artificial Sequence
  source: /note="Description of Artificial Sequence: Synthetic oligonucleotide"
gguccagccugaacuucuuuu

SEQ ID NO: 360 - RNA, 21 nt, Artificial Sequence
  source: /note="Description of Artificial Sequence: Synthetic oligonucleotide"
aagaaguucaggcuggaccuu

SEQ ID NO: 361 - RNA, 21 nt, Artificial Sequence
  source: /note="Description of Artificial Sequence: Synthetic oligonucleotide"
gcggcuuccugggcuucuauu

SEQ ID NO: 362 - RNA, 21 nt, Artificial Sequence
  source: /note="Description of Artificial Sequence: Synthetic oligonucleotide"
uagaagcccaggaagccgcuu

SEQ ID NO: 363 - RNA, 21 nt, Artificial Sequence
  source: /note="Description of Artificial Sequence: Synthetic oligonucleotide"
gcggcuuccugggcuucuauu

SEQ ID NO: 364 - RNA, 21 nt, Artificial Sequence
  source: /note="Description of Artificial Sequence: Synthetic oligonucleotide"
uagaagcccaggaagccgcuu

SEQ ID NO: 365 - RNA, 21 nt, Artificial Sequence
  source: /note="Description of Artificial Sequence: Synthetic oligonucleotide"
guuccugcuucaugcccuuuu

SEQ ID NO: 366 - RNA, 21 nt, Artificial Sequence
  source: /note="Description of Artificial Sequence: Synthetic oligonucleotide"
aagggcaugaagcaggaacuu

SEQ ID NO: 367 - RNA, 21 nt, Artificial Sequence
  source: /note="Description of Artificial Sequence: Synthetic oligonucleotide"
guuccugcuucaugcccuuuu

SEQ ID NO: 368 - RNA, 21 nt, Artificial Sequence
  source: /note="Description of Artificial Sequence: Synthetic oligonucleotide"
aagggcaugaagcaggaacuu

SEQ ID NO: 369 - RNA, 21 nt, Artificial Sequence
  source: /note="Description of Artificial Sequence: Synthetic oligonucleotide"
ccugcuucaugcccuucuauu

SEQ ID NO: 370 - RNA, 21 nt, Artificial Sequence
  source: /note="Description of Artificial Sequence: Synthetic oligonucleotide"
uagaagggcaugaagcagguu

SEQ ID NO: 371 - RNA, 21 nt, Artificial Sequence
  source: /note="Description of Artificial Sequence: Synthetic oligonucleotide"
ccugcuucaugcccuucuauu

SEQ ID NO: 372 - RNA, 21 nt, Artificial Sequence
  source: /note="Description of Artificial Sequence: Synthetic oligonucleotide"
uagaagggcaugaagcagguu

SEQ ID NO: 373 - RNA, 21 nt, Artificial Sequence
  source: /note="Description of Artificial Sequence: Synthetic oligonucleotide"
augcccuucuacaguggccuu

SEQ ID NO: 374 - RNA, 21 nt, Artificial Sequence
  source: /note="Description of Artificial Sequence: Synthetic oligonucleotide"
ggccacuguagaagggcauuu

SEQ ID NO: 375 - RNA, 21 nt, Artificial Sequence
  source: /note="Description of Artificial Sequence: Synthetic oligonucleotide"
auggcuuccagauaugccuuu

SEQ ID NO: 376 - RNA, 21 nt, Artificial Sequence
  source: /note="Description of Artificial Sequence: Synthetic oligonucleotide"
aggcauaucuggaagccauuu

SEQ ID NO: 377 - RNA, 21 nt, Artificial Sequence
  source: /note="Description of Artificial Sequence: Synthetic oligonucleotide"
gugacaacguacccuucauuu

SEQ ID NO: 378 - RNA, 21 nt, Artificial Sequence
  source: /note="Description of Artificial Sequence: Synthetic oligonucleotide"
augaaggguacguugucacuu

SEQ ID NO: 379 - RNA, 21 nt, Artificial Sequence
  source: /note="Description of Artificial Sequence: Synthetic oligonucleotide"
guauguuccugcuucaugcuu

SEQ ID NO: 380 - RNA, 21 nt, Artificial Sequence
  source: /note="Description of Artificial Sequence: Synthetic oligonucleotide"
gcaugaagcaggaacauacuu

SEQ ID NO: 381 - RNA, 21 nt, Artificial Sequence
  source: /note="Description of Artificial Sequence: Synthetic oligonucleotide"
guauguuccugcuucaugcuu

SEQ ID NO: 382 - RNA, 21 nt, Artificial Sequence
  source: /note="Description of Artificial Sequence: Synthetic oligonucleotide"
gcaugaagcaggaacauacuu

SEQ ID NO: 383 - RNA, 21 nt, Artificial Sequence
  source: /note="Description of Artificial Sequence: Synthetic oligonucleotide"
guauguuccugcuucaugcuu

SEQ ID NO: 384 - RNA, 21 nt, Artificial Sequence
  source: /note="Description of Artificial Sequence: Synthetic oligonucleotide"
gcaugaagcaggaacauacuu

SEQ ID NO: 385 - RNA, 21 nt, Artificial Sequence
  source: /note="Description of Artificial Sequence: Synthetic oligonucleotide"
guauguuccugcuucaugccu

SEQ ID NO: 386 - RNA, 23 nt, Artificial Sequence
  source: /note="Description of Artificial Sequence: Synthetic oligonucleotide"
aggcaugaagcaggaacauacuu

SEQ ID NO: 387 - RNA, 21 nt, Artificial Sequence
  source: /note="Description of Artificial Sequence: Synthetic oligonucleotide"
ugguauguuccugcuucaugu

SEQ ID NO: 388 - RNA, 23 nt, Artificial Sequence
  source: /note="Description of Artificial Sequence: Synthetic oligonucleotide"
gcaugaagcaggaacauaccauu

SEQ ID NO: 389 - RNA, 19 nt, Artificial Sequence
  source: /note="Description of Artificial Sequence: Synthetic oligonucleotide"
guauguuccugcuucaugu

SEQ ID NO: 390 - RNA, 21 nt, Artificial Sequence
  source: /note="Description of Artificial Sequence: Synthetic oligonucleotide"
gcaugaagcaggaacauacuu

SEQ ID NO: 391 - RNA, 20 nt, Artificial Sequence
  source: /note="Description of Artificial Sequence: Synthetic oligonucleotide"
  modified_base (20)..(20): Inverted abasic nucleotide
guauguuccugcuucaugcn

SEQ ID NO: 392 - RNA, 21 nt, Artificial Sequence
  source: /note="Description of Artificial Sequence: Synthetic oligonucleotide"
gcaugaagcaggaacauacuu

SEQ ID NO: 393 - RNA, 21 nt, Artificial Sequence
  source: /note="Description of Artificial Sequence: Synthetic oligonucleotide"
gcuucaugcccuucuacauuu

SEQ ID NO: 394 - RNA, 21 nt, Artificial Sequence
  source: /note="Description of Artificial Sequence: Synthetic oligonucleotide"
auguagaagggcaugaagcuu

SEQ ID NO: 395 - RNA, 21 nt, Artificial Sequence
  source: /note="Description of Artificial Sequence: Synthetic oligonucleotide"
gcuucaugcccuucuacauuu

SEQ ID NO: 396 - RNA, 21 nt, Artificial Sequence
  source: /note="Description of Artificial Sequence: Synthetic oligonucleotide"
auguagaagggcaugaagcuu

SEQ ID NO: 397 - RNA, 21 nt, Artificial Sequence
  source: /note="Description of Artificial Sequence: Synthetic oligonucleotide"
gcuucaugcccuucuacauuu

SEQ ID NO: 398 - RNA, 21 nt, Artificial Sequence
  source: /note="Description of Artificial Sequence: Synthetic oligonucleotide"
auguagaagggcaugaagcuu

SEQ ID NO: 399 - RNA, 21 nt, Artificial Sequence
  source: /note="Description of Artificial Sequence: Synthetic oligonucleotide"
gcuucaugcccuucuacauuu

SEQ ID NO: 400 - RNA, 21 nt, Artificial Sequence
  source: /note="Description of Artificial Sequence: Synthetic oligonucleotide"
auguagaagggcaugaagcuu

SEQ ID NO: 401 - RNA, 21 nt, Artificial Sequence
  source: /note="Description of Artificial Sequence: Synthetic oligonucleotide"
gcuucaugcccuucuacauuu

SEQ ID NO: 402 - RNA, 21 nt, Artificial Sequence
  source: /note="Description of Artificial Sequence: Synthetic oligonucleotide"
auguagaagggcaugaagcuu

SEQ ID NO: 403 - RNA, 21 nt, Artificial Sequence
  source: /note="Description of Artificial Sequence: Synthetic oligonucleotide"
gcuucaugcccuucuacauuu

SEQ ID NO: 404 - RNA, 21 nt, Artificial Sequence
  source: /note="Description of Artificial Sequence: Synthetic oligonucleotide"
auguagaagggcaugaagcuu

SEQ ID NO: 405 - RNA, 21 nt, Artificial Sequence
  source: /note="Description of Artificial Sequence: Synthetic oligonucleotide"
gcuucaugcccuucuacauuu

SEQ ID NO: 406 - RNA, 21 nt, Artificial Sequence
  source: /note="Description of Artificial Sequence: Synthetic oligonucleotide"
auguagaagggcaugaagcuu

SEQ ID NO: 407 - RNA, 21 nt, Artificial Sequence
  source: /note="Description of Artificial Sequence: Synthetic oligonucleotide"
gcuucaugcccuucuacauuu

SEQ ID NO: 408 - RNA, 21 nt, Artificial Sequence
  source: /note="Description of Artificial Sequence: Synthetic oligonucleotide"
auguagaagggcaugaagcuu

SEQ ID NO: 409 - RNA, 21 nt, Artificial Sequence
  source: /note="Description of Artificial Sequence: Synthetic oligonucleotide"
gcuucaugcccuucuacauuu

SEQ ID NO: 410 - RNA, 21 nt, Artificial Sequence
  source: /note="Description of Artificial Sequence: Synthetic oligonucleotide"
auguagaagggcaugaagcuu

SEQ ID NO: 411 - RNA, 21 nt, Artificial Sequence
  source: /note="Description of Artificial Sequence: Synthetic oligonucleotide"
gcuucaugcccuucuacauuu

SEQ ID NO: 412 - RNA, 21 nt, Artificial Sequence
  source: /note="Description of Artificial Sequence: Synthetic oligonucleotide"
auguagaagggcaugaagcuu

SEQ ID NO: 413 - RNA, 21 nt, Artificial Sequence
  source: /note="Description of Artificial Sequence: Synthetic oligonucleotide"
gcuucaugcccuucuacauuu

SEQ ID NO: 414 - RNA, 21 nt, Artificial Sequence
  source: /note="Description of Artificial Sequence: Synthetic oligonucleotide"
auguagaagggcaugaagcuu

SEQ ID NO: 415 - RNA, 21 nt, Artificial Sequence
  source: /note="Description of Artificial Sequence: Synthetic oligonucleotide"
gcuucaugcccuucuacauuu

SEQ ID NO: 416 - RNA, 21 nt, Artificial Sequence
  source: /note="Description of Artificial Sequence: Synthetic oligonucleotide"
auguagaagggcaugaagcuu

SEQ ID NO: 417 - RNA, 21 nt, Artificial Sequence
  source: /note="Description of Artificial Sequence: Synthetic oligonucleotide"
gcuucaugcccuucuacauuu

SEQ ID NO: 418 - RNA, 21 nt, Artificial Sequence
  source: /note="Description of Artificial Sequence: Synthetic oligonucleotide"
auguagaagggcaugaagcuu

SEQ ID NO: 419 - RNA, 21 nt, Artificial Sequence
  source: /note="Description of Artificial Sequence: Synthetic oligonucleotide"
gcuucaugcccuucuacauuu

SEQ ID NO: 420 - RNA, 21 nt, Artificial Sequence
  source: /note="Description of Artificial Sequence: Synthetic oligonucleotide"
auguagaagggcaugaagcuu

SEQ ID NO: 421 - RNA, 21 nt, Artificial Sequence
  source: /note="Description of Artificial Sequence: Synthetic oligonucleotide"
gcuucaugcccuucuacauuu

SEQ ID NO: 422 - RNA, 21 nt, Artificial Sequence
  source: /note="Description of Artificial Sequence: Synthetic oligonucleotide"
auguagaagggcaugaagcuu

SEQ ID NO: 423 - RNA, 21 nt, Artificial Sequence
  source: /note="Description of Artificial Sequence: Synthetic oligonucleotide"
gcuucaugcccuucuacauuu

SEQ ID NO: 424 - RNA, 21 nt, Artificial Sequence
  source: /note="Description of Artificial Sequence: Synthetic oligonucleotide"
auguagaagggcaugaagcuu

SEQ ID NO: 425 - DNA, 21 bp, Artificial Sequence
  source: /note="Description of Artificial Sequence: Synthetic oligonucleotide"
  source: /note="Description of Combined DNA/RNA Molecule: Synthetic oligonucleotide"
gcuucaugcccuucuacauuu

SEQ ID NO: 426 - RNA, 21 nt, Artificial Sequence
  source: /note="Description of Artificial Sequence: Synthetic oligonucleotide"
auguagaagggcaugaagcuu

SEQ ID NO: 427 - DNA, 21 bp, Artificial Sequence
  source: /note="Description of Artificial Sequence: Synthetic oligonucleotide"
  source: /note="Description of Combined DNA/RNA Molecule: Synthetic oligonucleotide"
gcuucaugcccuucuacauuu

SEQ ID NO: 428 - RNA, 21 nt, Artificial Sequence
  source: /note="Description of Artificial Sequence: Synthetic oligonucleotide"
auguagaagggcaugaagcuu

SEQ ID NO: 429 - DNA, 21 bp, Artificial Sequence
  source: /note="Description of Artificial Sequence: Synthetic oligonucleotide"
  source: /note="Description of Combined DNA/RNA Molecule: Synthetic oligonucleotide"
gcuucaugcccuucuacauuu

SEQ ID NO: 430 - RNA, 21 nt, Artificial Sequence
  source: /note="Description of Artificial Sequence: Synthetic oligonucleotide"
auguagaagggcaugaagcuu

SEQ ID NO: 431 - RNA, 21 nt, Artificial Sequence
  source: /note="Description of Artificial Sequence: Synthetic oligonucleotide"
gcuucaugcccuucuacauuu

SEQ ID NO: 432 - RNA, 21 nt, Artificial Sequence
  source: /note="Description of Artificial Sequence: Synthetic oligonucleotide"
auguagaagggcaugaagcuu

SEQ ID NO: 433 - RNA, 21 nt, Artificial Sequence
  source: /note="Description of Artificial Sequence: Synthetic oligonucleotide"
gcuucaugcccuucuacauuu

SEQ ID NO: 434 - RNA, 21 nt, Artificial Sequence
  source: /note="Description of Artificial Sequence: Synthetic oligonucleotide"
auguagaagggcaugaagcuu

SEQ ID NO: 435 - RNA, 21 nt, Artificial Sequence
  source: /note="Description of Artificial Sequence: Synthetic oligonucleotide"
gcuucaugcccuucuacauuu

SEQ ID NO: 436 - RNA, 21 nt, Artificial Sequence
  source: /note="Description of Artificial Sequence: Synthetic oligonucleotide"
auguagaagggcaugaagcuu

SEQ ID NO: 437 - RNA, 21 nt, Artificial Sequence
  source: /note="Description of Artificial Sequence: Synthetic oligonucleotide"
gcuucaugcccuucuacauuu

SEQ ID NO: 438 - RNA, 21 nt, Artificial Sequence
  source: /note="Description of Artificial Sequence: Synthetic oligonucleotide"
auguagaagggcaugaagcuu

SEQ ID NO: 439 - RNA, 21 nt, Artificial Sequence
  source: /note="Description of Artificial Sequence: Synthetic oligonucleotide"
gcuucaugcccuucuacauuu

SEQ ID NO: 440 - RNA, 21 nt, Artificial Sequence
  source: /note="Description of Artificial Sequence: Synthetic oligonucleotide"
auguagaagggcaugaagcuu

SEQ ID NO: 441 - RNA, 21 nt, Artificial Sequence
  source: /note="Description of Artificial Sequence: Synthetic oligonucleotide"
gcuucaugcccuucuacaguu

SEQ ID NO: 442 - RNA, 23 nt, Artificial Sequence
  source: /note="Description of Artificial Sequence: Synthetic oligonucleotide"
aacuguagaagggcaugaagcuu

SEQ ID NO: 443 - RNA, 21 nt, Artificial Sequence
  source: /note="Description of Artificial Sequence: Synthetic oligonucleotide"
cugcuucaugcccuucuacau

SEQ ID NO: 444 - RNA, 23 nt, Artificial Sequence
  source: /note="Description of Artificial Sequence: Synthetic oligonucleotide"
auguagaagggcaugaagcaguu

SEQ ID NO: 445 - RNA, 19 nt, Artificial Sequence
  source: /note="Description of Artificial Sequence: Synthetic oligonucleotide"
gcuucaugcccuucuacau

SEQ ID NO: 446 - RNA, 21 nt, Artificial Sequence
  source: /note="Description of Artificial Sequence: Synthetic oligonucleotide"
auguagaagggcaugaagcuu

SEQ ID NO: 447 - RNA, 20 nt, Artificial Sequence
  source: /note="Description of Artificial Sequence: Synthetic oligonucleotide"
  modified_base (20)..(20): Inverted abasic nucleotide
gcuucaugcccuucuacaun

SEQ ID NO: 448 - RNA, 21 nt, Artificial Sequence
  source: /note="Description of Artificial Sequence: Synthetic oligonucleotide"
auguagaagggcaugaagcuu

SEQ ID NO: 449 - RNA, 22 nt, Artificial Sequence
  source: /note="Description of Artificial Sequence: Synthetic oligonucleotide"
  modified_base (22)..(22): Inverted abasic nucleotide
gcuucaugcccuucuacauuun

SEQ ID NO: 450 - RNA, 21 nt, Artificial Sequence
  source: /note="Description of Artificial Sequence: Synthetic oligonucleotide"
auguagaagggcaugaagcuu

SEQ ID NO: 451 - RNA, 21 nt, Artificial Sequence
  source: /note="Description of Artificial Sequence: Synthetic oligonucleotide"
gcuucaugcccuucuacauuu

SEQ ID NO: 452 - RNA, 21 nt, Artificial Sequence
  source: /note="Description of Artificial Sequence: Synthetic oligonucleotide"
auguagaagggcaugaagcuu

SEQ ID NO: 453 - RNA, 21 nt, Artificial Sequence
  source: /note="Description of Artificial Sequence: Synthetic oligonucleotide"
gcuucaugcccuucuacauuu

SEQ ID NO: 454 - RNA, 21 nt, Artificial Sequence
  source: /note="Description of Artificial Sequence: Synthetic oligonucleotide"
auguagaagggcaugaagcuu

SEQ ID NO: 455 - RNA, 21 nt, Artificial Sequence
  source: /note="Description of Artificial Sequence: Synthetic oligonucleotide"
gcuucaugcccuucuacauuu

SEQ ID NO: 456 - RNA, 21 nt, Artificial Sequence
  source: /note="Description of Artificial Sequence: Synthetic oligonucleotide"
auguagaagggcaugaagcuu

SEQ ID NO: 457 - RNA, 21 nt, Artificial Sequence
  source: /note="Description of Artificial Sequence: Synthetic oligonucleotide"
gcuucaugcccuucuacauuu

SEQ ID NO: 458 - RNA, 21 nt, Artificial Sequence
  source: /note="Description of Artificial Sequence: Synthetic oligonucleotide"
auguagaagggcaugaagcuu

SEQ ID NO: 459 - RNA, 21 nt, Artificial Sequence
  source: /note="Description of Artificial Sequence: Synthetic oligonucleotide"
gcuucaugcccuucuacauuu

SEQ ID NO: 460 - RNA, 21 nt, Artificial Sequence
  source: /note="Description of Artificial Sequence: Synthetic oligonucleotide"
auguagaagggcaugaagcuu

SEQ ID NO: 461 - RNA, 21 nt, Artificial Sequence
  source: /note="Description of Artificial Sequence: Synthetic oligonucleotide"
gcuucaugcccuucuacauuu

SEQ ID NO: 462 - RNA, 21 nt, Artificial Sequence
  source: /note="Description of Artificial Sequence: Synthetic oligonucleotide"
auguagaagggcaugaagcuu

SEQ ID NO: 463 - RNA, 21 nt, Artificial Sequence
  source: /note="Description of Artificial Sequence: Synthetic oligonucleotide"
gcuucaugcccuucuacauuu

SEQ ID NO: 464 - RNA, 21 nt, Artificial Sequence
  source: /note="Description of Artificial Sequence: Synthetic oligonucleotide"
auguagaagggcaugaagcuu

SEQ ID NO: 465 - RNA, 21 nt, Artificial Sequence
  source: /note="Description of Artificial Sequence: Synthetic oligonucleotide"
gcuucaugcccuucuacauuu

SEQ ID NO: 466 - RNA, 21 nt, Artificial Sequence
  source: /note="Description of Artificial Sequence: Synthetic oligonucleotide"
auguagaagggcaugaagcuu

SEQ ID NO: 467 - RNA, 21 nt, Artificial Sequence
  source: /note="Description of Artificial Sequence: Synthetic oligonucleotide"
gcuucaugcccuucuacauuu

SEQ ID NO: 468 - RNA, 21 nt, Artificial Sequence
  source: /note="Description of Artificial Sequence: Synthetic oligonucleotide"
auguagaagggcaugaagcuu

SEQ ID NO: 469 - RNA, 22 nt, Artificial Sequence
  source: /note="Description of Artificial Sequence: Synthetic oligonucleotide"
  modified_base (22)..(22): Inverted abasic nucleotide
guauguuccugcuucaugcuun

SEQ ID NO: 470 - RNA, 21 nt, Artificial Sequence
  source: /note="Description of Artificial Sequence: Synthetic oligonucleotide"
gcaugaagcaggaacauacuu

SEQ ID NO: 471 - RNA, 21 nt, Artificial Sequence
  source: /note="Description of Artificial Sequence: Synthetic oligonucleotide"
gguauguuccugcuucauuuu

SEQ ID NO: 472 - RNA, 21 nt, Artificial Sequence
  source: /note="Description of Artificial Sequence: Synthetic oligonucleotide"
aaugaagcaggaacauaccuu

SEQ ID NO: 473 - RNA, 21 nt, Artificial Sequence
  source: /note="Description of Artificial Sequence: Synthetic oligonucleotide"
guauguuccugcuucauguuu

SEQ ID NO: 474 - RNA, 21 nt, Artificial Sequence
  source: /note="Description of Artificial Sequence: Synthetic oligonucleotide"
acaugaagcaggaacauacuu

SEQ ID NO: 475 - RNA, 21 nt, Artificial Sequence
  source: /note="Description of Artificial Sequence: Synthetic oligonucleotide"
cggccaauguccaccagcuuu

SEQ ID NO: 476 - RNA, 21 nt, Artificial Sequence
  source: /note="Description of Artificial Sequence: Synthetic oligonucleotide"
agcugguggacauuggccguu

SEQ ID NO: 477 - RNA, 21 nt, Artificial Sequence
  source: /note="Description of Artificial Sequence: Synthetic oligonucleotide"
uggagcagacucugcagguuu

SEQ ID NO: 478 - RNA, 21 nt, Artificial Sequence
  source: /note="Description of Artificial Sequence: Synthetic oligonucleotide"
accugcagagucugcuccauu

SEQ ID NO: 479 - RNA, 21 nt, Artificial Sequence
  source: /note="Description of Artificial Sequence: Synthetic oligonucleotide"
acguacccuucauugauguuu

SEQ ID NO: 480 - RNA, 21 nt, Artificial Sequence
  source: /note="Description of Artificial Sequence: Synthetic oligonucleotide"
acaucaaugaaggguacguuu

SEQ ID NO: 481 - RNA, 21 nt, Artificial Sequence
  source: /note="Description of Artificial Sequence: Synthetic oligonucleotide"
ccagagacuggugacauguuu

SEQ ID NO: 482 - RNA, 21 nt, Artificial Sequence
  source: /note="Description of Artificial Sequence: Synthetic oligonucleotide"
acaugucaccagucucugguu

SEQ ID NO: 483 - RNA, 22 nt, Artificial Sequence
  source: /note="Description of Artificial Sequence: Synthetic oligonucleotide"
  modified_base (1)..(1): Inverted abasic nucleotide
ngcuucaugccuuucuacauuu

SEQ ID NO: 484 - RNA, 21 nt, Artificial Sequence
  source: /note="Description of Artificial Sequence: Synthetic oligonucleotide"
auguagaaaggcaugaagcuu

SEQ ID NO: 485 - RNA, 22 nt, Artificial Sequence
  source: /note="Description of Artificial Sequence: Synthetic oligonucleotide"
  modified_base (1)..(1): Inverted abasic nucleotide
ngcuucaugccuuucuacauuu

SEQ ID NO: 486 - RNA, 23 nt, Artificial Sequence
  source: /note="Description of Artificial Sequence: Synthetic oligonucleotide"
aaauguagaaaggcaugaagcuu

SEQ ID NO: 487 - RNA, 22 nt, Artificial Sequence
  source: /note="Description of Artificial Sequence: Synthetic oligonucleotide"
  modified_base (1)..(1): Inverted abasic nucleotide
ngcuucaugccuuucuacauuu

SEQ ID NO: 488 - RNA, 23 nt, Artificial Sequence
  source: /note="Description of Artificial Sequence: Synthetic oligonucleotide"
aaauguagaaaggcaugaagcuu

SEQ ID NO: 489 - RNA, 21 nt, Artificial Sequence
  source: /note="Description of Artificial Sequence: Synthetic oligonucleotide"
ugcuucaugccuuucuacauu

SEQ ID NO: 490 - RNA, 21 nt, Artificial Sequence
  source: /note="Description of Artificial Sequence: Synthetic oligonucleotide"
uguagaaaggcaugaagcauu

SEQ ID NO: 491 - RNA, 21 nt, Artificial Sequence
  source: /note="Description of Artificial Sequence: Synthetic oligonucleotide"
uauguuccugcuucaugcuuu

SEQ ID NO: 492 - RNA, 21 nt, Artificial Sequence
  source: /note="Description of Artificial Sequence: Synthetic oligonucleotide"
agcaugaagcaggaacauauu

SEQ ID NO: 493 - RNA, 21 nt, Artificial Sequence
  source: /note="Description of Artificial Sequence: Synthetic oligonucleotide"
uuccugcuucaugccuuuuuu

SEQ ID NO: 494 - RNA, 21 nt, Artificial Sequence
  source: /note="Description of Artificial Sequence: Synthetic oligonucleotide"
aaaaggcaugaagcaggaauu

SEQ ID NO: 495 - RNA, 21 nt, Artificial Sequence
  source: /note="Description of Artificial Sequence: Synthetic oligonucleotide"
ucaugccuuucuacaguguuu

SEQ ID NO: 496 - RNA, 21 nt, Artificial Sequence
  source: /note="Description of Artificial Sequence: Synthetic oligonucleotide"
acacuguagaaaggcaugauu

SEQ ID NO: 497 - RNA, 21 nt, Artificial Sequence
  source: /note="Description of Artificial Sequence: Synthetic oligonucleotide"
caugccuuucuacagugguuu

SEQ ID NO: 498 - RNA, 21 nt, Artificial Sequence
  source: /note="Description of Artificial Sequence: Synthetic oligonucleotide"
accacuguagaaaggcauguu

SEQ ID NO: 499 - RNA, 21 nt, Artificial Sequence
  source: /note="Description of Artificial Sequence: Synthetic oligonucleotide"
augccuuucuacaguggcuuu

SEQ ID NO: 500 - RNA, 21 nt, Artificial Sequence
  source: /note="Description of Artificial Sequence: Synthetic oligonucleotide"
agccacuguagaaaggcauuu

SEQ ID NO: 501 - RNA, 21 nt, Artificial Sequence
  source: /note="Description of Artificial Sequence: Synthetic oligonucleotide"
gguauguuccugcuucauauu

SEQ ID NO: 502 - RNA, 21 nt, Artificial Sequence
  source: /note="Description of Artificial Sequence: Synthetic oligonucleotide"
uaugaagcaggaacauaccuu

SEQ ID NO: 503 - RNA, 21 nt, Artificial Sequence
  source: /note="Description of Artificial Sequence: Synthetic oligonucleotide"
guauguuccugcuucaugauu

SEQ ID NO: 504 - RNA, 21 nt, Artificial Sequence
  source: /note="Description of Artificial Sequence: Synthetic oligonucleotide"
ucaugaagcaggaacauacuu

SEQ ID NO: 505 - RNA, 21 nt, Artificial Sequence
  source: /note="Description of Artificial Sequence: Synthetic oligonucleotide"
uauguuccugcuucaugcauu

SEQ ID NO: 506 - RNA, 21 nt, Artificial Sequence
  source: /note="Description of Artificial Sequence: Synthetic oligonucleotide"
ugcaugaagcaggaacauauu

SEQ ID NO: 507 - RNA, 21 nt, Artificial Sequence
  source: /note="Description of Artificial Sequence: Synthetic oligonucleotide"
uuccugcuucaugccuuuauu

SEQ ID NO: 508 - RNA, 21 nt, Artificial Sequence
  source: /note="Description of Artificial Sequence: Synthetic oligonucleotide"
uaaaggcaugaagcaggaauu

SEQ ID NO: 509 - RNA, 21 nt, Artificial Sequence
  source: /note="Description of Artificial Sequence: Synthetic oligonucleotide"
cugcuucaugccuuucuaauu

SEQ ID NO: 510 - RNA, 21 nt, Artificial Sequence
  source: /note="Description of Artificial Sequence: Synthetic oligonucleotide"
uuagaaaggcaugaagcaguu

SEQ ID NO: 511 - RNA, 21 nt, Artificial Sequence
  source: /note="Description of Artificial Sequence: Synthetic oligonucleotide"
gcuucaugccuuucuacaauu

SEQ ID NO: 512 - RNA, 21 nt, Artificial Sequence
  source: /note="Description of Artificial Sequence: Synthetic oligonucleotide"
uuguagaaaggcaugaagcuu

SEQ ID NO: 513 - RNA, 21 nt, Artificial Sequence
  source: /note="Description of Artificial Sequence: Synthetic oligonucleotide"
uucaugccuuucuacaguauu

SEQ ID NO: 514 - RNA, 21 nt, Artificial Sequence
  source: /note="Description of Artificial Sequence: Synthetic oligonucleotide"
uacuguagaaaggcaugaauu

SEQ ID NO: 515 - RNA, 21 nt, Artificial Sequence
  source: /note="Description of Artificial Sequence: Synthetic oligonucleotide"
ucaugccuuucuacagugauu

SEQ ID NO: 516 - RNA, 21 nt, Artificial Sequence
  source: /note="Description of Artificial Sequence: Synthetic oligonucleotide"
ucacuguagaaaggcaugauu

SEQ ID NO: 517 - RNA, 21 nt, Artificial Sequence
  source: /note="Description of Artificial Sequence: Synthetic oligonucleotide"
caugccuuucuacaguggauu

SEQ ID NO: 518 - RNA, 21 nt, Artificial Sequence
  source: /note="Description of Artificial Sequence: Synthetic oligonucleotide"
uccacuguagaaaggcauguu

SEQ ID NO: 519 - RNA, 21 nt, Artificial Sequence
  source: /note="Description of Artificial Sequence: Synthetic oligonucleotide"
augccuuucuacaguggcauu

SEQ ID NO: 520 - RNA, 21 nt, Artificial Sequence
  source: /note="Description of Artificial Sequence: Synthetic oligonucleotide"
ugccacuguagaaaggcauuu

SEQ ID NO: 521 - RNA, 21 nt, Artificial Sequence
  source: /note="Description of Artificial Sequence: Synthetic oligonucleotide"
acguacccuucauugaugauu

SEQ ID NO: 522 - RNA, 21 nt, Artificial Sequence
  source: /note="Description of Artificial Sequence: Synthetic oligonucleotide"
ucaucaaugaaggguacguuu

SEQ ID NO: 523 - RNA, 21 nt, Artificial Sequence
  source: /note="Description of Artificial Sequence: Synthetic oligonucleotide"
ccagagacuggugacaugauu

SEQ ID NO: 524 - RNA, 21 nt, Artificial Sequence
  source: /note="Description of Artificial Sequence: Synthetic oligonucleotide"
ucaugucaccagucucugguu

SEQ ID NO: 525 - RNA, 21 nt, Artificial Sequence
  source: /note="Description of Artificial Sequence: Synthetic oligonucleotide"
auggcuuccagauaugccauu

SEQ ID NO: 526 - RNA, 21 nt, Artificial Sequence
  source: /note="Description of Artificial Sequence: Synthetic oligonucleotide"
uggcauaucuggaagccauuu

SEQ ID NO: 527 - RNA, 21 nt, Artificial Sequence
  source: /note="Description of Artificial Sequence: Synthetic oligonucleotide"
guuccugcuucaugccuuuuu

SEQ ID NO: 528 - RNA, 21 nt, Artificial Sequence
  source: /note="Description of Artificial Sequence: Synthetic oligonucleotide"
aaaggcaugaagcaggaacuu

SEQ ID NO: 529 - RNA, 21 nt, Artificial Sequence
  source: /note="Description of Artificial Sequence: Synthetic oligonucleotide"
ccugcuucaugccuuucuauu

SEQ ID NO: 530 - RNA, 21 nt, Artificial Sequence
  source: /note="Description of Artificial Sequence: Synthetic oligonucleotide"
uagaaaggcaugaagcagguu

SEQ ID NO: 531 - RNA, 21 nt, Artificial Sequence
  source: /note="Description of Artificial Sequence: Synthetic oligonucleotide"
gcuucaugccuuucuacauuu

SEQ ID NO: 532 - RNA, 21 nt, Artificial Sequence
  source: /note="Description of Artificial Sequence: Synthetic oligonucleotide"
auguagaaaggcaugaagcuu

SEQ ID NO: 533 - RNA, 21 nt, Artificial Sequence
  source: /note="Description of Artificial Sequence: Synthetic oligonucleotide"
cuucaugccuuucuacaguuu

SEQ ID NO: 534 - RNA, 21 nt, Artificial Sequence
  source: /note="Description of Artificial Sequence: Synthetic oligonucleotide"
acuguagaaaggcaugaaguu

SEQ ID NO: 535 - RNA, 21 nt, Artificial Sequence
  source: /note="Description of Artificial Sequence: Synthetic oligonucleotide"
uucaugccuuucuacaguuuu

SEQ ID NO: 536 - RNA, 21 nt, Artificial Sequence
  source: /note="Description of Artificial Sequence: Synthetic oligonucleotide"
aacuguagaaaggcaugaauu

SEQ ID NO: 537 - RNA, 21 nt, Artificial Sequence
  source: /note="Description of Artificial Sequence: Synthetic oligonucleotide"
gcuucaucccuuucuacauuu

SEQ ID NO: 538 - RNA, 21 nt, Artificial Sequence
  source: /note="Description of Artificial Sequence: Synthetic oligonucleotide"
auguagaaagggaugaagcuu

SEQ ID NO: 539 - RNA, 22 nt, Artificial Sequence
  source: /note="Description of Artificial Sequence: Synthetic oligonucleotide"
  modified_base (1)..(1): Inverted abasic nucleotide
ngcuucaugcccuucuacauuu

SEQ ID NO: 540 - RNA, 21 nt, Artificial Sequence
  source: /note="Description of Artificial Sequence: Synthetic oligonucleotide"
auguagaagggcaugaagcuu

SEQ ID NO: 541 - RNA, 22 nt, Artificial Sequence
  source: /note="Description of Artificial Sequence: Synthetic oligonucleotide"
  modified_base (1)..(1): Inverted abasic nucleotide
ngcuucaugcccuucuacauuu

SEQ ID NO: 542 - RNA, 23 nt, Artificial Sequence
  source: /note="Description of Artificial Sequence: Synthetic oligonucleotide"
aaauguagaagggcaugaagcuu

SEQ ID NO: 543 - RNA, 22 nt, Artificial Sequence
  source: /note="Description of Artificial Sequence: Synthetic oligonucleotide"
  modified_base (1)..(1): Inverted abasic nucleotide
ngcuucaugcccuucuacauuu

SEQ ID NO: 544 - RNA, 23 nt, Artificial Sequence
  source: /note="Description of Artificial Sequence: Synthetic oligonucleotide"
aaauguagaagggcaugaagcuu

SEQ ID NO: 545 - RNA, 22 nt, Artificial Sequence
  source: /note="Description of Artificial Sequence: Synthetic oligonucleotide"
  modified_base (1)..(1): Inverted abasic nucleotide
ngcggcuuccugggcuucuauu

SEQ ID NO: 546 - RNA, 21 nt, Artificial Sequence
  source: /note="Description of Artificial Sequence: Synthetic oligonucleotide"
uagaagcccaggaagccgcuu

SEQ ID NO: 547 - RNA, 22 nt, Artificial Sequence
  source: /note="Description of Artificial Sequence: Synthetic oligonucleotide"
  modified_base (1)..(1): Inverted abasic nucleotide
ncugcggcuuccugggcuucua

SEQ ID NO: 548 - RNA, 23 nt, Artificial Sequence
  source: /note="Description of Artificial Sequence: Synthetic oligonucleotide"
uagaagcccaggaagccgcaguu

SEQ ID NO: 549 - RNA, 21 nt, Artificial Sequence
  source: /note="Description of Artificial Sequence: Synthetic oligonucleotide"
  modified_base (21)..(21): Inverted abasic nucleotide
cugcggcuuccugggcuucun

SEQ ID NO: 550 - RNA, 23 nt, Artificial Sequence
  source: /note="Description of Artificial Sequence: Synthetic oligonucleotide"
uagaagcccaggaagccgcaguu

SEQ ID NO: 551 - RNA, 22 nt, Artificial Sequence
  source: /note="Description of Artificial Sequence: Synthetic oligonucleotide"
  modified_base (1)..(1): Inverted abasic nucleotide
ncugcggcuuccugggcuucua

SEQ ID NO: 552 - RNA, 23 nt, Artificial Sequence
  source: /note="Description of Artificial Sequence: Synthetic oligonucleotide"
uagaagcccaggaagccgcaguu

SEQ ID NO: 553 - RNA, 22 nt, Artificial Sequence
  source: /note="Description of Artificial Sequence: Synthetic oligonucleotide"
  modified_base (1)..(1): Inverted abasic nucleotide
ngcggcuuccugggcuucuauu

SEQ ID NO: 554 - RNA, 21 nt, Artificial Sequence
  source: /note="Description of Artificial Sequence: Synthetic oligonucleotide"
uagaagcccaggaagccgcuu

SEQ ID NO: 555 - RNA, 21 nt, Artificial Sequence
  source: /note="Description of Artificial Sequence: Synthetic oligonucleotide"
  modified_base (21)..(21): Inverted abasic nucleotide
cugcggcuuccugggcuucun

SEQ ID NO: 556 - RNA, 23 nt, Artificial Sequence
  source: /note="Description of Artificial Sequence: Synthetic oligonucleotide"
uagaagcccaggaagccgcaguu

SEQ ID NO: 557 - RNA, 22 nt, Artificial Sequence
  source: /note="Description of Artificial Sequence: Synthetic oligonucleotide"
  modified_base (1)..(1): Inverted abasic nucleotide
ncugcggcuuccugggcuucua

SEQ ID NO: 558 - RNA, 23 nt, Artificial Sequence
  source: /note="Description of Artificial Sequence: Synthetic oligonucleotide"
uagaagcccaggaagccgcaguu

SEQ ID NO: 559 - RNA, 22 nt, Artificial Sequence
  source: /note="Description of Artificial Sequence: Synthetic oligonucleotide"
  modified_base (1)..(1): Inverted abasic nucleotide
ngcggcuuccugggcuucuauu

SEQ ID NO: 560 - RNA, 21 nt, Artificial Sequence
  source: /note="Description of Artificial Sequence: Synthetic oligonucleotide"
uagaagcccaggaagccgcuu

SEQ ID NO: 561 - RNA, 21 nt, Artificial Sequence
  source: /note="Description of Artificial Sequence: Synthetic oligonucleotide"
  modified_base (21)..(21): Inverted abasic nucleotide
cugcggcuuccugggcuucun

SEQ ID NO: 562 - RNA, 23 nt, Artificial Sequence
  source: /note="Description of Artificial Sequence: Synthetic oligonucleotide"
uagaagcccaggaagccgcaguu

SEQ ID NO: 563 - RNA, 22 nt, Artificial Sequence
  source: /note="Description of Artificial Sequence: Synthetic oligonucleotide"
  modified_base (1)..(1): Inverted abasic nucleotide
ncugcggcuuccugggcuucua

SEQ ID NO: 564 - RNA, 23 nt, Artificial Sequence
  source: /note="Description of Artificial Sequence: Synthetic oligonucleotide"
uagaagcccaggaagccgcaguu

SEQ ID NO: 565 - RNA, 22 nt, Artificial Sequence
  source: /note="Description of Artificial Sequence: Synthetic oligonucleotide"
  modified_base (1)..(1): Inverted abasic nucleotide
ngcggcuuccugggcuucuauu

SEQ ID NO: 566 - RNA, 21 nt, Artificial Sequence
  source: /note="Description of Artificial Sequence: Synthetic oligonucleotide"
uagaagcccaggaagccgcuu

SEQ ID NO: 567 - RNA, 22 nt, Artificial Sequence
  source: /note="Description of Artificial Sequence: Synthetic oligonucleotide"
  modified_base (1)..(1): Inverted abasic nucleotide
ncugcggcuuccugggcuucua

SEQ ID NO: 568 - RNA, 23 nt, Artificial Sequence
  source: /note="Description of Artificial Sequence: Synthetic oligonucleotide"
uagaagcccaggaagccgcaguu

SEQ ID NO: 569 - RNA, 22 nt, Artificial Sequence
  source: /note="Description of Artificial Sequence: Synthetic oligonucleotide"
  modified_base (1)..(1): Inverted abasic nucleotide
ncugcggcuuccugggcuucua

SEQ ID NO: 570 - RNA, 23 nt, Artificial Sequence
  source: /note="Description of Artificial Sequence: Synthetic oligonucleotide"
uagaagcccaggaagccgcaguu

SEQ ID NO: 571 - RNA, 22 nt, Artificial Sequence
  source: /note="Description of Artificial Sequence: Synthetic oligonucleotide"
  modified_base (1)..(1): Inverted abasic nucleotide
ncugcggcuuccugggcuucua

SEQ ID NO: 572 - RNA, 23 nt, Artificial Sequence
  source: /note="Description of Artificial Sequence: Synthetic oligonucleotide"
uagaagcccaggaagccgcaguu

SEQ ID NO: 573 - RNA, 22 nt, Artificial Sequence
  source: /note="Description of Artificial Sequence: Synthetic oligonucleotide"
  modified_base (1)..(1): Inverted abasic nucleotide
nauggcuuccagauaugccuuu

SEQ ID NO: 574 - RNA, 21 nt, Artificial Sequence
  source: /note="Description of Artificial Sequence: Synthetic oligonucleotide"
aggcauaucuggaagccauuu

SEQ ID NO: 575 - RNA, 22 nt, Artificial Sequence
  source: /note="Description of Artificial Sequence: Synthetic oligonucleotide"
  modified_base (1)..(1): Inverted abasic nucleotide
nacauggcuuccagauaugccu

SEQ ID NO: 576 - RNA, 23 nt, Artificial Sequence
  source: /note="Description of Artificial Sequence: Synthetic oligonucleotide"
aggcauaucuggaagccauguuu

SEQ ID NO: 577 - RNA, 21 nt, Artificial Sequence
  source: /note="Description of Artificial Sequence: Synthetic oligonucleotide"
  modified_base (21)..(21): Inverted abasic nucleotide
acauggcuuccagauaugccn

SEQ ID NO: 578 - RNA, 23 nt, Artificial Sequence
  source: /note="Description of Artificial Sequence: Synthetic oligonucleotide"
aggcauaucuggaagccauguuu

SEQ ID NO: 579 - RNA, 22 nt, Artificial Sequence
  source: /note="Description of Artificial Sequence: Synthetic oligonucleotide"
  modified_base (1)..(1): Inverted abasic nucleotide
nacauggcuuccagauaugccu

SEQ ID NO: 580 - RNA, 23 nt, Artificial Sequence
  source: /note="Description of Artificial Sequence: Synthetic oligonucleotide"
aggcauaucuggaagccauguuu

SEQ ID NO: 581 - RNA, 22 nt, Artificial Sequence
  source: /note="Description of Artificial Sequence: Synthetic oligonucleotide"
  modified_base (1)..(1): Inverted abasic nucleotide
nauggcuuccagauaugccuuu

SEQ ID NO: 582 - RNA, 21 nt, Artificial Sequence
  source: /note="Description of Artificial Sequence: Synthetic oligonucleotide"
aggcauaucuggaagccauuu

SEQ ID NO: 583 - RNA, 21 nt, Artificial Sequence
  source: /note="Description of Artificial Sequence: Synthetic oligonucleotide"
  modified_base (21)..(21): Inverted abasic nucleotide
acauggcuuccagauaugccn

SEQ ID NO: 584 - RNA, 23 nt, Artificial Sequence
  source: /note="Description of Artificial Sequence: Synthetic oligonucleotide"
aggcauaucuggaagccauguuu

SEQ ID NO: 585 - RNA, 22 nt, Artificial Sequence
  source: /note="Description of Artificial Sequence: Synthetic oligonucleotide"
  modified_base (1)..(1): Inverted abasic nucleotide
nacauggcuuccagauaugccu

SEQ ID NO: 586 - RNA, 23 nt, Artificial Sequence
  source: /note="Description of Artificial Sequence: Synthetic oligonucleotide"
aggcauaucuggaagccauguuu

SEQ ID NO: 587 - RNA, 22 nt, Artificial Sequence
  source: /note="Description of Artificial Sequence: Synthetic oligonucleotide"
  modified_base (1)..(1): Inverted abasic nucleotide
nauggcuuccagauaugccuuu

SEQ ID NO: 588 - RNA, 21 nt, Artificial Sequence
  source: /note="Description of Artificial Sequence: Synthetic oligonucleotide"
aggcauaucuggaagccauuu

SEQ ID NO: 589 - RNA, 21 nt, Artificial Sequence
  source: /note="Description of Artificial Sequence: Synthetic oligonucleotide"
  modified_base (21)..(21): Inverted abasic nucleotide
acauggcuuccagauaugccn

SEQ ID NO: 590 - RNA, 23 nt, Artificial Sequence
  source: /note="Description of Artificial Sequence: Synthetic oligonucleotide"
aggcauaucuggaagccauguuu

SEQ ID NO: 591 - RNA, 22 nt, Artificial Sequence
  source: /note="Description of Artificial Sequence: Synthetic oligonucleotide"
  modified_base (1)..(1): Inverted abasic nucleotide
nacauggcuuccagauaugccu

SEQ ID NO: 592 - RNA, 23 nt, Artificial Sequence
  source: /note="Description of Artificial Sequence: Synthetic oligonucleotide"
aggcauaucuggaagccauguuu

SEQ ID NO: 593 - RNA, 22 nt, Artificial Sequence
  source: /note="Description of Artificial Sequence: Synthetic oligonucleotide"
  modified_base (1)..(1): Inverted abasic nucleotide
nauggcuuccagauaugccuuu

SEQ ID NO: 594 - RNA, 21 nt, Artificial Sequence
  source: /note="Description of Artificial Sequence: Synthetic oligonucleotide"
aggcauaucuggaagccauuu

SEQ ID NO: 595 - RNA, 21 nt, Artificial Sequence
  source: /note="Description of Artificial Sequence: Synthetic oligonucleotide"
  modified_base (21)..(21): Inverted abasic nucleotide
acauggcuuccagauaugccn

SEQ ID NO: 596 - RNA, 23 nt, Artificial Sequence
  source: /note="Description of Artificial Sequence: Synthetic oligonucleotide"
aggcauaucuggaagccauguuu

SEQ ID NO: 597 - RNA, 22 nt, Artificial Sequence
  source: /note="Description of Artificial Sequence: Synthetic oligonucleotide"
  modified_base (1)..(1): Inverted abasic nucleotide
nacauggcuuccagauaugccu

SEQ ID NO: 598 - RNA, 23 nt, Artificial Sequence
  source: /note="Description of Artificial Sequence: Synthetic oligonucleotide"
aggcauaucuggaagccauguuu

SEQ ID NO: 599 - RNA, 22 nt, Artificial Sequence
  source: /note="Description of Artificial Sequence: Synthetic oligonucleotide"
  modified_base (1)..(1): Inverted abasic nucleotide
nacauggcuuccagauaugccu

SEQ ID NO: 600 - RNA, 23 nt, Artificial Sequence
  source: /note="Description of Artificial Sequence: Synthetic oligonucleotide"
aggcauaucuggaagccauguuu

SEQ ID NO: 601 - RNA, 22 nt, Artificial Sequence
  source: /note="Description of Artificial Sequence: Synthetic oligonucleotide"
  modified_base (1)..(1): Inverted abasic nucleotide
nacauggcuuccagauaugccu

SEQ ID NO: 602 - RNA, 23 nt, Artificial Sequence
  source: /note="Description of Artificial Sequence: Synthetic oligonucleotide"
aggcauaucuggaagccauguuu

SEQ ID NO: 603 - RNA, 22 nt, Artificial Sequence
  source: /note="Description of Artificial Sequence: Synthetic oligonucleotide"
  modified_base (1)..(1): Inverted abasic nucleotide
nacauggcuuccagauaugccu

SEQ ID NO: 604 - RNA, 23 nt, Artificial Sequence
  source: /note="Description of Artificial Sequence: Synthetic oligonucleotide"
aggcauaucuggaagccauguuu

SEQ ID NO: 605 - RNA, 22 nt, Artificial Sequence
  source: /note="Description of Artificial Sequence: Synthetic oligonucleotide"
  modified_base (1)..(1): Inverted abasic nucleotide
nacguacccuucauugauguuu

SEQ ID NO: 606 - RNA, 21 nt, Artificial Sequence
  source: /note="Description of Artificial Sequence: Synthetic oligonucleotide"
acaucaaugaaggguacguuu

SEQ ID NO: 607 - RNA, 22 nt, Artificial Sequence
  source: /note="Description of Artificial Sequence: Synthetic oligonucleotide"
  modified_base (1)..(1): Inverted abasic nucleotide
ncaacguacccuucauugaugu

SEQ ID NO: 608 - RNA, 23 nt, Artificial Sequence
  source: /note="Description of Artificial Sequence: Synthetic oligonucleotide"
acaucaaugaaggguacguuguu

SEQ ID NO: 609 - RNA, 22 nt, Artificial Sequence
  source: /note="Description of Artificial Sequence: Synthetic oligonucleotide"
  modified_base (1)..(1): Inverted abasic nucleotide
ncaacguacccuucauugaugu

SEQ ID NO: 610 - RNA, 23 nt, Artificial Sequence
  source: /note="Description of Artificial Sequence: Synthetic oligonucleotide"
acaucaaugaaggguacguuguu

SEQ ID NO: 611 - RNA, 22 nt, Artificial Sequence
  source: /note="Description of Artificial Sequence: Synthetic oligonucleotide"
  modified_base (1)..(1): Inverted abasic nucleotide
nacguacccuucauugauguuu

SEQ ID NO: 612 - RNA, 21 nt, Artificial Sequence
  source: /note="Description of Artificial Sequence: Synthetic oligonucleotide"
acaucaaugaaggguacguuu

SEQ ID NO: 613 - RNA, 21 nt, Artificial Sequence
  source: /note="Description of Artificial Sequence: Synthetic oligonucleotide"
  modified_base (21)..(21): Inverted abasic nucleotide
caacguacccuucauugaugn

SEQ ID NO: 614 - RNA, 23 nt, Artificial Sequence
  source: /note="Description of Artificial Sequence: Synthetic oligonucleotide"
acaucaaugaaggguacguuguu

SEQ ID NO: 615 - RNA, 22 nt, Artificial Sequence
  source: /note="Description of Artificial Sequence: Synthetic oligonucleotide"
  modified_base (1)..(1): Inverted abasic nucleotide
nacguacccuucauugauguuu

SEQ ID NO: 616 - RNA, 21 nt, Artificial Sequence
  source: /note="Description of Artificial Sequence: Synthetic oligonucleotide"
acaucaaugaaggguacguuu

SEQ ID NO: 617 - RNA, 21 nt, Artificial Sequence
  source: /note="Description of Artificial Sequence: Synthetic oligonucleotide"
  modified_base (21)..(21): Inverted abasic nucleotide
caacguacccuucauugaugn

SEQ ID NO: 618 - RNA, 23 nt, Artificial Sequence
  source: /note="Description of Artificial Sequence: Synthetic oligonucleotide"
acaucaaugaaggguacguuguu

SEQ ID NO: 619 - RNA, 22 nt, Artificial Sequence
  source: /note="Description of Artificial Sequence: Synthetic oligonucleotide"
  modified_base (1)..(1): Inverted abasic nucleotide
ncaacguacccuucauugaugu

SEQ ID NO: 620 - RNA, 23 nt, Artificial Sequence
  source: /note="Description of Artificial Sequence: Synthetic oligonucleotide"
acaucaaugaaggguacguuguu

SEQ ID NO: 621 - RNA, 22 nt, Artificial Sequence
  source: /note="Description of Artificial Sequence: Synthetic oligonucleotide"
  modified_base (1)..(1): Inverted abasic nucleotide
nacguacccuucauugauguuu

SEQ ID NO: 622 - RNA, 21 nt, Artificial Sequence
  source: /note="Description of Artificial Sequence: Synthetic oligonucleotide"
acaucaaugaaggguacguuu

SEQ ID NO: 623 - RNA, 21 nt, Artificial Sequence
  source: /note="Description of Artificial Sequence: Synthetic oligonucleotide"
  modified_base (21)..(21): Inverted abasic nucleotide
caacguacccuucauugaugn

SEQ ID NO: 624 - RNA, 23 nt, Artificial Sequence
  source: /note="Description of Artificial Sequence: Synthetic oligonucleotide"
acaucaaugaaggguacguuguu

SEQ ID NO: 625 - RNA, 22 nt, Artificial Sequence
  source: /note="Description of Artificial Sequence: Synthetic oligonucleotide"
  modified_base (1)..(1): Inverted abasic nucleotide
ncaacguacccuucauugaugu

SEQ ID NO: 626 - RNA, 23 nt, Artificial Sequence
  source: /note="Description of Artificial Sequence: Synthetic oligonucleotide"
acaucaaugaaggguacguuguu

SEQ ID NO: 627 - RNA, 22 nt, Artificial Sequence
  source: /note="Description of Artificial Sequence: Synthetic oligonucleotide"
  modified_base (1)..(1): Inverted abasic nucleotide
ncaacguacccuucauugaugu

SEQ ID NO: 628 - RNA, 23 nt, Artificial Sequence
  source: /note="Description of Artificial Sequence: Synthetic oligonucleotide"
acaucaaugaaggguacguuguu

SEQ ID NO: 629 - RNA, 22 nt, Artificial Sequence
  source: /note="Description of Artificial Sequence: Synthetic oligonucleotide"
  modified_base (1)..(1): Inverted abasic nucleotide
ncaacguacccuucauugaugu

SEQ ID NO: 630 - RNA, 23 nt, Artificial Sequence
  source: /note="Description of Artificial Sequence: Synthetic oligonucleotide"
acaucaaugaaggguacguuguu

SEQ ID NO: 631 - RNA, 22 nt, Artificial Sequence
  source: /note="Description of Artificial Sequence: Synthetic oligonucleotide"
  modified_base (1)..(1): Inverted abasic nucleotide
ncaacguacccuucauugaugu

SEQ ID NO: 632 - RNA, 23 nt, Artificial Sequence
  source: /note="Description of Artificial Sequence: Synthetic oligonucleotide"
acaucaaugaaggguacguuguu

SEQ ID NO: 633 - RNA, 21 nt, Artificial Sequence
  source: /note="Description of Artificial Sequence: Synthetic oligonucleotide"
cugcuucaugccuuucuacau

SEQ ID NO: 634 - RNA, 23 nt, Artificial Sequence
  source: /note="Description of Artificial Sequence: Synthetic oligonucleotide"
auguagaaaggcaugaagcaguu

SEQ ID NO: 635 - RNA, 21 nt, Artificial Sequence
  source: /note="Description of Artificial Sequence: Synthetic oligonucleotide"
cugcuucaugccuuucuacau

SEQ ID NO: 636 - RNA, 23 nt, Artificial Sequence
  source: /note="Description of Artificial Sequence: Synthetic oligonucleotide"
auguagaaaggcaugaagcaguu

SEQ ID NO: 637 - RNA, 22 nt, Artificial Sequence
  source: /note="Description of Artificial Sequence: Synthetic oligonucleotide"
  modified_base (1)..(1): Inverted abasic nucleotide
ngcuucaugccuuucuacauuu

SEQ ID NO: 638 - RNA, 21 nt, Artificial Sequence
  source: /note="Description of Artificial Sequence: Synthetic oligonucleotide"
auguagaaaggcaugaagcuu

SEQ ID NO: 639 - RNA, 22 nt, Artificial Sequence
  source: /note="Description of Artificial Sequence: Synthetic oligonucleotide"
  modified_base (1)..(1): Inverted abasic nucleotide
ngcuucaugccuuucuacauuu

SEQ ID NO: 640 - RNA, 21 nt, Artificial Sequence
  source: /note="Description of Artificial Sequence: Synthetic oligonucleotide"
auguagaaaggcaugaagcuu

SEQ ID NO: 641 - RNA, 21 nt, Artificial Sequence
  source: /note="Description of Artificial Sequence: Synthetic oligonucleotide"
cugcuucaugccuuucuacau

SEQ ID NO: 642 - RNA, 23 nt, Artificial Sequence
  source: /note="Description of Artificial Sequence: Synthetic oligonucleotide"
auguagaaaggcaugaagcaguu

SEQ ID NO: 643 - RNA, 21 nt, Artificial Sequence
  source: /note="Description of Artificial Sequence: Synthetic oligonucleotide"
cugcuucaugccuuucuacau

SEQ ID NO: 644 - RNA, 23 nt, Artificial Sequence
  source: /note="Description of Artificial Sequence: Synthetic oligonucleotide"
auguagaaaggcaugaagcaguu

SEQ ID NO: 645 - RNA, 22 nt, Artificial Sequence
  source: /note="Description of Artificial Sequence: Synthetic oligonucleotide"
  modified_base (1)..(1): Inverted abasic nucleotide
ncugcuucaugccuuucuacau

SEQ ID NO: 646 - RNA, 23 nt, Artificial Sequence
  source: /note="Description of Artificial Sequence: Synthetic oligonucleotide"
auguagaaaggcaugaagcaguu

SEQ ID NO: 647 - RNA, 21 nt, Artificial Sequence
  source: /note="Description of Artificial Sequence: Synthetic oligonucleotide"
  modified_base (21)..(21): Inverted abasic nucleotide
cugcuucaugccuuucuacan

SEQ ID NO: 648 - RNA, 23 nt, Artificial Sequence
  source: /note="Description of Artificial Sequence: Synthetic oligonucleotide"
auguagaaaggcaugaagcaguu

SEQ ID NO: 649 - RNA, 22 nt, Artificial Sequence
  source: /note="Description of Artificial Sequence: Synthetic oligonucleotide"
  modified_base (1)..(1): Inverted abasic nucleotide
ncugcuucaugccuuucuacau

SEQ ID NO: 650 - RNA, 23 nt, Artificial Sequence
  source: /note="Description of Artificial Sequence: Synthetic oligonucleotide"
auguagaaaggcaugaagcaguu

SEQ ID NO: 651 - DNA, 22 bp, Artificial Sequence
  source: /note="Description of Artificial Sequence: Synthetic oligonucleotide"
  source: /note="Description of Combined DNA/RNA Molecule: Synthetic oligonucleotide"
  modified_base (1)..(1): Inverted abasic nucleotide
ncugcuucaugccuuucuacau

SEQ ID NO: 652 - RNA, 23 nt, Artificial Sequence
  source: /note="Description of Artificial Sequence: Synthetic oligonucleotide"
auguagaaaggcaugaagcaguu

SEQ ID NO: 653 - RNA, 21 nt, Artificial Sequence
  source: /note="Description of Artificial Sequence: Synthetic oligonucleotide"
cugcuucaugccuuucuacau

SEQ ID NO: 654 - RNA, 23 nt, Artificial Sequence
  source: /note="Description of Artificial Sequence: Synthetic oligonucleotide"
auguagaaaggcaugaagcaguu

SEQ ID NO: 655 - RNA, 22 nt, Artificial Sequence
  source: /note="Description of Artificial Sequence: Synthetic oligonucleotide"
  modified_base (1)..(1): Inverted abasic nucleotide
ncugcuucaugccuuucuacau

SEQ ID NO: 656 - RNA, 23 nt, Artificial Sequence
  source: /note="Description of Artificial Sequence: Synthetic oligonucleotide"
auguagaaaggcaugaagcaguu

SEQ ID NO: 657 - RNA, 21 nt, Artificial Sequence
  source: /note="Description of Artificial Sequence: Synthetic oligonucleotide"
cugcuucaugccuuucuacau

SEQ ID NO: 658 - RNA, 23 nt, Artificial Sequence
  source: /note="Description of Artificial Sequence: Synthetic oligonucleotide"
auguagaaaggcaugaagcaguu

SEQ ID NO: 659 - RNA, 21 nt, Artificial Sequence
  source: /note="Description of Artificial Sequence: Synthetic oligonucleotide"
  modified_base (21)..(21): Inverted abasic nucleotide
cugcuucaugccuuucuacan

SEQ ID NO: 660 - RNA, 23 nt, Artificial Sequence
  source: /note="Description of Artificial Sequence: Synthetic oligonucleotide"
auguagaaaggcaugaagcaguu

SEQ ID NO: 661 - RNA, 22 nt, Artificial Sequence
  source: /note="Description of Artificial Sequence: Synthetic oligonucleotide"
  modified_base (1)..(1): Inverted abasic nucleotide
ncugcuucaugccuuucuacau

SEQ ID NO: 662 - RNA, 23 nt, Artificial Sequence
  source: /note="Description of Artificial Sequence: Synthetic oligonucleotide"
auguagaaaggcaugaagcaguu

SEQ ID NO: 663 - RNA, 21 nt, Artificial Sequence
  source: /note="Description of Artificial Sequence: Synthetic oligonucleotide"
cugcuucaugccuuucuacau

SEQ ID NO: 664 - RNA, 23 nt, Artificial Sequence
  source: /note="Description of Artificial Sequence: Synthetic oligonucleotide"
auguagaaaggcaugaagcaguu

SEQ ID NO: 665 - RNA, 21 nt, Artificial Sequence
  source: /note="Description of Artificial Sequence: Synthetic oligonucleotide"
  modified_base (21)..(21): Inverted abasic nucleotide
cugcuucaugccuuucuacan

SEQ ID NO: 666 - RNA, 23 nt, Artificial Sequence
  source: /note="Description of Artificial Sequence: Synthetic oligonucleotide"
auguagaaaggcaugaagcaguu

SEQ ID NO: 667 - RNA, 22 nt, Artificial Sequence
  source: /note="Description of Artificial Sequence: Synthetic oligonucleotide"
  modified_base (1)..(1): Inverted abasic nucleotide
ncugcuucaugccuuucuacau

SEQ ID NO: 668 - RNA, 23 nt, Artificial Sequence
  source: /note="Description of Artificial Sequence: Synthetic oligonucleotide"
auguagaaaggcaugaagcaguu

SEQ ID NO: 669 - RNA, 21 nt, Artificial Sequence
  source: /note="Description of Artificial Sequence: Synthetic oligonucleotide"
  modified_base (21)..(21): Inverted abasic nucleotide
cugcuucaugccuuucuacan

SEQ ID NO: 670 - RNA, 23 nt, Artificial Sequence
  source: /note="Description of Artificial Sequence: Synthetic oligonucleotide"
auguagaaaggcaugaagcaguu

SEQ ID NO: 671 - RNA, 22 nt, Artificial Sequence
  source: /note="Description of Artificial Sequence: Synthetic oligonucleotide"
  modified_base (1)..(1): Inverted abasic nucleotide
ncugcuucaugccuuucuacau

SEQ ID NO: 672 - RNA, 23 nt, Artificial Sequence
  source: /note="Description of Artificial Sequence: Synthetic oligonucleotide"
auguagaaaggcaugaagcaguu

SEQ ID NO: 673 - RNA, 22 nt, Artificial Sequence
  source: /note="Description of Artificial Sequence: Synthetic oligonucleotide"
  modified_base (1)..(1): Inverted abasic nucleotide
ngcuucaugccuuucuacauuu

SEQ ID NO: 674 - RNA, 21 nt, Artificial Sequence
  source: /note="Description of Artificial Sequence: Synthetic oligonucleotide"
auguagaaaggcaugaagcuu

SEQ ID NO: 675 - RNA, 22 nt, Artificial Sequence
  source: /note="Description of Artificial Sequence: Synthetic oligonucleotide"
  modified_base (1)..(1): Inverted abasic nucleotide
ngcuucaugccuuucuacauuu

SEQ ID NO: 676 - RNA, 21 nt, Artificial Sequence
  source: /note="Description of Artificial Sequence: Synthetic oligonucleotide"
auguagaaaggcaugaagcuu

SEQ ID NO: 677 - RNA, 22 nt, Artificial Sequence
  source: /note="Description of Artificial Sequence: Synthetic oligonucleotide"
  modified_base (1)..(1): Inverted abasic nucleotide
ngcuucaugccuuucuacauuu

SEQ ID NO: 678 - RNA, 21 nt, Artificial Sequence
  source: /note="Description of Artificial Sequence: Synthetic oligonucleotide"
auguagaaaggcaugaagcuu

SEQ ID NO: 679 - RNA, 22 nt, Artificial Sequence
  source: /note="Description of Artificial Sequence: Synthetic oligonucleotide"
  modified_base (1)..(1): Inverted abasic nucleotide
ngcuucaugccuuucuacauuu

SEQ ID NO: 680 - RNA, 21 nt, Artificial Sequence
  source: /note="Description of Artificial Sequence: Synthetic oligonucleotide"
auguagaaaggcaugaagcuu

SEQ ID NO: 681 - RNA, 22 nt, Artificial Sequence
  source: /note="Description of Artificial Sequence: Synthetic oligonucleotide"
  modified_base (1)..(1): Inverted abasic nucleotide
ngcuucaugccuuucuacauuu

SEQ ID NO: 682 - RNA, 21 nt, Artificial Sequence
  source: /note="Description of Artificial Sequence: Synthetic oligonucleotide"
auguagaaaggcaugaagcuu

SEQ ID NO: 683 - RNA, 21 nt, Artificial Sequence
  source: /note="Description of Artificial Sequence: Synthetic oligonucleotide"
cugcuucaugcccuucuacau

SEQ ID NO: 684 - RNA, 23 nt, Artificial Sequence
  source: /note="Description of Artificial Sequence: Synthetic oligonucleotide"
auguagaagggcaugaagcaguu

SEQ ID NO: 685 - RNA, 22 nt, Artificial Sequence
  source: /note="Description of Artificial Sequence: Synthetic oligonucleotide"
  modified_base (1)..(1): Inverted abasic nucleotide
ngcuucaugcccuucuacauuu

SEQ ID NO: 686 - RNA, 21 nt, Artificial Sequence
  source: /note="Description of Artificial Sequence: Synthetic oligonucleotide"
auguagaagggcaugaagcuu

SEQ ID NO: 687 - RNA, 22 nt, Artificial Sequence
  source: /note="Description of Artificial Sequence: Synthetic oligonucleotide"
  modified_base (1)..(1): Inverted abasic nucleotide
ngcuucaugcccuucuacauuu

SEQ ID NO: 688 - RNA, 21 nt, Artificial Sequence
  source: /note="Description of Artificial Sequence: Synthetic oligonucleotide"
auguagaagggcaugaagcuu

SEQ ID NO: 689 - RNA, 22 nt, Artificial Sequence
  source: /note="Description of Artificial Sequence: Synthetic oligonucleotide"
  modified_base (1)..(1): Inverted abasic nucleotide
ngcuucaugcccuucuacauuu

SEQ ID NO: 690 - RNA, 21 nt, Artificial Sequence
  source: /note="Description of Artificial Sequence: Synthetic oligonucleotide"
auguagaagggcaugaagcuu

SEQ ID NO: 691 - RNA, 21 nt, Artificial Sequence
  source: /note="Description of Artificial Sequence: Synthetic oligonucleotide"
  modified_base (21)..(21): Inverted abasic nucleotide
cugcuucaugcccuucuacan

SEQ ID NO: 692 - RNA, 23 nt, Artificial Sequence
  source: /note="Description of Artificial Sequence: Synthetic oligonucleotide"
auguagaagggcaugaagcaguu

SEQ ID NO: 693 - RNA, 22 nt, Artificial Sequence
  source: /note="Description of Artificial Sequence: Synthetic oligonucleotide"
  modified_base (1)..(1): Inverted abasic nucleotide
ncugcuucaugcccuucuacau

SEQ ID NO: 694 - RNA, 23 nt, Artificial Sequence
  source: /note="Description of Artificial Sequence: Synthetic oligonucleotide"
auguagaagggcaugaagcaguu

SEQ ID NO: 695 - RNA, 22 nt, Artificial Sequence
  source: /note="Description of Artificial Sequence: Synthetic oligonucleotide"
  modified_base (1)..(1): Inverted abasic nucleotide
ngcuucaugcccuucuacauuu

SEQ ID NO: 696 - RNA, 21 nt, Artificial Sequence
  source: /note="Description of Artificial Sequence: Synthetic oligonucleotide"
auguagaagggcaugaagcuu

SEQ ID NO: 697 - RNA, 21 nt, Artificial Sequence
  source: /note="Description of Artificial Sequence: Synthetic oligonucleotide"
auguuccugcuucaugccuuu

SEQ ID NO: 698 - RNA, 21 nt, Artificial Sequence
  source: /note="Description of Artificial Sequence: Synthetic oligonucleotide"
aggcaugaagcaggaacauuu

SEQ ID NO: 699 - RNA, 21 nt, Artificial Sequence
  source: /note="Description of Artificial Sequence: Synthetic oligonucleotide"
uguuccugcuucaugccuuuu

SEQ ID NO: 700 - RNA, 21 nt, Artificial Sequence
  source: /note="Description of Artificial Sequence: Synthetic oligonucleotide"
aaggcaugaagcaggaacauu

SEQ ID NO: 701 - RNA, 21 nt, Artificial Sequence
  source: /note="Description of Artificial Sequence: Synthetic oligonucleotide"
ugccuuucuacaguggccuuu

SEQ ID NO: 702 - RNA, 21 nt, Artificial Sequence
  source: /note="Description of Artificial Sequence: Synthetic oligonucleotide"
aggccacuguagaaaggcauu

SEQ ID NO: 703 - RNA, 21 nt, Artificial Sequence
  source: /note="Description of Artificial Sequence: Synthetic oligonucleotide"
cguacuucguccuuguauguu

SEQ ID NO: 704 - RNA, 21 nt, Artificial Sequence
  source: /note="Description of Artificial Sequence: Synthetic oligonucleotide"
cauacaaggacgaaguacguu

SEQ ID NO: 705 - DNA, 22 bp, Artificial Sequence
  source: /note="Description of Artificial Sequence: Synthetic oligonucleotide"
  source: /note="Description of Combined DNA/RNA Molecule: Synthetic oligonucleotide"
  modified_base (1)..(1): Inverted abasic nucleotide
ngcuucaugcccuucuacauuu

SEQ ID NO: 706 - RNA, 21 nt, Artificial Sequence
  source: /note="Description of Artificial Sequence: Synthetic oligonucleotide"
auguagaagggcaugaagcuu

SEQ ID NO: 707 - RNA, 22 nt, Artificial Sequence
  source: /note="Description of Artificial Sequence: Synthetic oligonucleotide"
  modified_base (1)..(1): Inverted abasic nucleotide
ngcuucaugcccuucuacauuu

SEQ ID NO: 708 - RNA, 21 nt, Artificial Sequence
  source: /note="Description of Artificial Sequence: Synthetic oligonucleotide"
auguagaagggcaugaagcuu

SEQ ID NO: 709 - RNA, 22 nt, Artificial Sequence
  source: /note="Description of Artificial Sequence: Synthetic oligonucleotide"
  modified_base (1)..(1): Inverted abasic nucleotide
ngcuucaugcccuucuacauuu

SEQ ID NO: 710 - RNA, 21 nt, Artificial Sequence
  source: /note="Description of Artificial Sequence: Synthetic oligonucleotide"
auguagaagggcaugaagcuu

SEQ ID NO: 711 - RNA, 22 nt, Artificial Sequence
  source: /note="Description of Artificial Sequence: Synthetic oligonucleotide"
  modified_base (1)..(1): Inverted abasic nucleotide
ngcuucaugcccuucuacauuu

SEQ ID NO: 712 - RNA, 21 nt, Artificial Sequence
  source: /note="Description of Artificial Sequence: Synthetic oligonucleotide"
auguagaagggcaugaagcuu

SEQ ID NO: 713 - RNA, 22 nt, Artificial Sequence
  source: /note="Description of Artificial Sequence: Synthetic oligonucleotide"
  modified_base (1)..(1): Inverted abasic nucleotide
ngcuucaugcccuucuacauuu

SEQ ID NO: 714 - RNA, 21 nt, Artificial Sequence
  source: /note="Description of Artificial Sequence: Synthetic oligonucleotide"
auguagaagggcaugaagcuu

SEQ ID NO: 715 - RNA, 22 nt, Artificial Sequence
  source: /note="Description of Artificial Sequence: Synthetic oligonucleotide"
  modified_base (1)..(1): Inverted abasic nucleotide
ngcuucaugcccuucuacauuu

SEQ ID NO: 716 - RNA, 21 nt, Artificial Sequence
  source: /note="Description of Artificial Sequence: Synthetic oligonucleotide"
auguagaagggcaugaagcuu

SEQ ID NO: 717 - RNA, 22 nt, Artificial Sequence
  source: /note="Description of Artificial Sequence: Synthetic oligonucleotide"
  modified_base (1)..(1): Inverted abasic nucleotide
nccugcuucaugccuuucuauu

SEQ ID NO: 718 - RNA, 21 nt, Artificial Sequence
  source: /note="Description of Artificial Sequence: Synthetic oligonucleotide"
uagaaaggcaugaagcagguu

SEQ ID NO: 719 - RNA, 22 nt, Artificial Sequence
  source: /note="Description of Artificial Sequence: Synthetic oligonucleotide"
  modified_base (1)..(1): Inverted abasic nucleotide
nccugcuucaugccuuucuauu

SEQ ID NO: 720 - RNA, 21 nt, Artificial Sequence
  source: /note="Description of Artificial Sequence: Synthetic oligonucleotide"
uagaaaggcaugaagcagguu

SEQ ID NO: 721 - RNA, 21 nt, Artificial Sequence
  source: /note="Description of Artificial Sequence: Synthetic oligonucleotide"
  modified_base (21)..(21): Inverted abasic nucleotide
uuccugcuucaugccuuucun

SEQ ID NO: 722 - RNA, 23 nt, Artificial Sequence
  source: /note="Description of Artificial Sequence: Synthetic oligonucleotide"
uagaaaggcaugaagcaggaauu

SEQ ID NO: 723 - RNA, 22 nt, Artificial Sequence
  source: /note="Description of Artificial Sequence: Synthetic oligonucleotide"
  modified_base (1)..(1): Inverted abasic nucleotide
nccugcuucaugccuuucuauu

SEQ ID NO: 724 - RNA, 21 nt, Artificial Sequence
  source: /note="Description of Artificial Sequence: Synthetic oligonucleotide"
uagaaaggcaugaagcagguu

SEQ ID NO: 725 - RNA, 21 nt, Artificial Sequence
  source: /note="Description of Artificial Sequence: Synthetic oligonucleotide"
  modified_base (21)..(21): Inverted abasic nucleotide
uuccugcuucaugccuuucun

SEQ ID NO: 726 - RNA, 23 nt, Artificial Sequence
  source: /note="Description of Artificial Sequence: Synthetic oligonucleotide"
uagaaaggcaugaagcaggaauu

SEQ ID NO: 727 - RNA, 22 nt, Artificial Sequence
  source: /note="Description of Artificial Sequence: Synthetic oligonucleotide"
  modified_base (1)..(1): Inverted abasic nucleotide
naugccuuucuacaguggcuuu

SEQ ID NO: 728 - RNA, 21 nt, Artificial Sequence
  source: /note="Description of Artificial Sequence: Synthetic oligonucleotide"
agccacuguagaaaggcauuu

SEQ ID NO: 729 - RNA, 22 nt, Artificial Sequence
  source: /note="Description of Artificial Sequence: Synthetic oligonucleotide"
  modified_base (1)..(1): Inverted abasic nucleotide
naugccuuucuacaguggcuuu

SEQ ID NO: 730 - RNA, 21 nt, Artificial Sequence
  source: /note="Description of Artificial Sequence: Synthetic oligonucleotide"
agccacuguagaaaggcauuu

SEQ ID NO: 731 - RNA, 22 nt, Artificial Sequence
  source: /note="Description of Artificial Sequence: Synthetic oligonucleotide"
  modified_base (1)..(1): Inverted abasic nucleotide
naugccuuucuacaguggcuuu

SEQ ID NO: 732 - RNA, 21 nt, Artificial Sequence
  source: /note="Description of Artificial Sequence: Synthetic oligonucleotide"
agccacuguagaaaggcauuu

SEQ ID NO: 733 - RNA, 21 nt, Artificial Sequence
  source: /note="Description of Artificial Sequence: Synthetic oligonucleotide"
  modified_base (21)..(21): Inverted abasic nucleotide
ucaugccuuucuacaguggcn

SEQ ID NO: 734 - RNA, 23 nt, Artificial Sequence
  source: /note="Description of Artificial Sequence: Synthetic oligonucleotide"
agccacuguagaaaggcaugauu

SEQ ID NO: 735 - RNA, 22 nt, Artificial Sequence
  source: /note="Description of Artificial Sequence: Synthetic oligonucleotide"
  modified_base (1)..(1): Inverted abasic nucleotide
naugccuuucuacaguggcuuu

SEQ ID NO: 736 - RNA, 21 nt, Artificial Sequence
  source: /note="Description of Artificial Sequence: Synthetic oligonucleotide"
agccacuguagaaaggcauuu

SEQ ID NO: 737 - RNA, 22 nt, Artificial Sequence
  source: /note="Description of Artificial Sequence: Synthetic oligonucleotide"
  modified_base (1)..(1): Inverted abasic nucleotide
nucaugccuuucuacaguggcu

SEQ ID NO: 738 - RNA, 23 nt, Artificial Sequence
  source: /note="Description of Artificial Sequence: Synthetic oligonucleotide"
agccacuguagaaaggcaugauu

SEQ ID NO: 739 - RNA, 22 nt, Artificial Sequence
  source: /note="Description of Artificial Sequence: Synthetic oligonucleotide"
  modified_base (1)..(1): Inverted abasic nucleotide
nugcuucaugccuuucuacagu

SEQ ID NO: 740 - RNA, 23 nt, Artificial Sequence
  source: /note="Description of Artificial Sequence: Synthetic oligonucleotide"
acuguagaaaggcaugaagcauu

SEQ ID NO: 741 - RNA, 22 nt, Artificial Sequence
  source: /note="Description of Artificial Sequence: Synthetic oligonucleotide"
  modified_base (1)..(1): Inverted abasic nucleotide
ncuucaugccuuucuacaguuu

SEQ ID NO: 742 - RNA, 21 nt, Artificial Sequence
  source: /note="Description of Artificial Sequence: Synthetic oligonucleotide"
acuguagaaaggcaugaaguu

SEQ ID NO: 743 - RNA, 21 nt, Artificial Sequence
  source: /note="Description of Artificial Sequence: Synthetic oligonucleotide"
  modified_base (21)..(21): Inverted abasic nucleotide
ugcuucaugccuuucuacagn

SEQ ID NO: 744 - RNA, 23 nt, Artificial Sequence
  source: /note="Description of Artificial Sequence: Synthetic oligonucleotide"
acuguagaaaggcaugaagcauu

SEQ ID NO: 745 - RNA, 22 nt, Artificial Sequence
  source: /note="Description of Artificial Sequence: Synthetic oligonucleotide"
  modified_base (1)..(1): Inverted abasic nucleotide
ncuucaugccuuucuacaguuu

SEQ ID NO: 746 - RNA, 21 nt, Artificial Sequence
  source: /note="Description of Artificial Sequence: Synthetic oligonucleotide"
acuguagaaaggcaugaaguu

SEQ ID NO: 747 - RNA, 21 nt, Artificial Sequence
  source: /note="Description of Artificial Sequence: Synthetic oligonucleotide"
  modified_base (21)..(21): Inverted abasic nucleotide
ugcuucaugccuuucuacagn

SEQ ID NO: 748 - RNA, 23 nt, Artificial Sequence
  source: /note="Description of Artificial Sequence: Synthetic oligonucleotide"
acuguagaaaggcaugaagcauu

SEQ ID NO: 749 - RNA, 22 nt, Artificial Sequence
  source: /note="Description of Artificial Sequence: Synthetic oligonucleotide"
  modified_base (1)..(1): Inverted abasic nucleotide
nugcuucaugccuuucuacagu

SEQ ID NO: 750 - RNA, 23 nt, Artificial Sequence
  source: /note="Description of Artificial Sequence: Synthetic oligonucleotide"
acuguagaaaggcaugaagcauu

SEQ ID NO: 751 - RNA, 22 nt, Artificial Sequence
  source: /note="Description of Artificial Sequence: Synthetic oligonucleotide"
  modified_base (1)..(1): Inverted abasic nucleotide
nugcuucaugccuuucuacagu

SEQ ID NO: 752 - RNA, 23 nt, Artificial Sequence
  source: /note="Description of Artificial Sequence: Synthetic oligonucleotide"
acuguagaaaggcaugaagcauu

SEQ ID NO: 753 - RNA, 22 nt, Artificial Sequence
  source: /note="Description of Artificial Sequence: Synthetic oligonucleotide"
  modified_base (1)..(1): Inverted abasic nucleotide
nugcuucaugccuuucuacagu

SEQ ID NO: 754 - RNA, 23 nt, Artificial Sequence
  source: /note="Description of Artificial Sequence: Synthetic oligonucleotide"
acuguagaaaggcaugaagcauu

SEQ ID NO: 755 - RNA, 22 nt, Artificial Sequence
  source: /note="Description of Artificial Sequence: Synthetic oligonucleotide"
  modified_base (1)..(1): Inverted abasic nucleotide
nugcuucaugccuuucuacagu

SEQ ID NO: 756 - RNA, 23 nt, Artificial Sequence
  source: /note="Description of Artificial Sequence: Synthetic oligonucleotide"
acuguagaaaggcaugaagcauu

SEQ ID NO: 757 - RNA, 22 nt, Artificial Sequence
  source: /note="Description of Artificial Sequence: Synthetic oligonucleotide"
  modified_base (1)..(1): Inverted abasic nucleotide
nguuccugcuucaugccuuuuu

SEQ ID NO: 758 - RNA, 21 nt, Artificial Sequence
  source: /note="Description of Artificial Sequence: Synthetic oligonucleotide"
aaaggcaugaagcaggaacuu

SEQ ID NO: 759 - RNA, 22 nt, Artificial Sequence
  source: /note="Description of Artificial Sequence: Synthetic oligonucleotide"
  modified_base (1)..(1): Inverted abasic nucleotide
nccugcuucaugccuuucuauu

SEQ ID NO: 760 - RNA, 21 nt, Artificial Sequence
  source: /note="Description of Artificial Sequence: Synthetic oligonucleotide"
uagaaaggcaugaagcagguu

SEQ ID NO: 761 - RNA, 22 nt, Artificial Sequence
  source: /note="Description of Artificial Sequence: Synthetic oligonucleotide"
  modified_base (1)..(1): Inverted abasic nucleotide
ncuucaugccuuucuacaguuu

SEQ ID NO: 762 - RNA, 21 nt, Artificial Sequence
  source: /note="Description of Artificial Sequence: Synthetic oligonucleotide"
acuguagaaaggcaugaaguu

SEQ ID NO: 763 - RNA, 22 nt, Artificial Sequence
  source: /note="Description of Artificial Sequence: Synthetic oligonucleotide"
  modified_base (1)..(1): Inverted abasic nucleotide
nuuccugcuucaugccuuucua

SEQ ID NO: 764 - RNA, 23 nt, Artificial Sequence
  source: /note="Description of Artificial Sequence: Synthetic oligonucleotide"
uagaaaggcaugaagcaggaauu

SEQ ID NO: 765 - RNA, 21 nt, Artificial Sequence
  source: /note="Description of Artificial Sequence: Synthetic oligonucleotide"
  modified_base (21)..(21): Inverted abasic nucleotide
uuccugcuucaugccuuucun

SEQ ID NO: 766 - RNA, 23 nt, Artificial Sequence
  source: /note="Description of Artificial Sequence: Synthetic oligonucleotide"
uagaaaggcaugaagcaggaauu

SEQ ID NO: 767 - RNA, 22 nt, Artificial Sequence
  source: /note="Description of Artificial Sequence: Synthetic oligonucleotide"
  modified_base (1)..(1): Inverted abasic nucleotide
nuuccugcuucaugccuuucua

SEQ ID NO: 768 - RNA, 23 nt, Artificial Sequence
  source: /note="Description of Artificial Sequence: Synthetic oligonucleotide"
uagaaaggcaugaagcaggaauu

SEQ ID NO: 769 - RNA, 21 nt, Artificial Sequence
  source: /note="Description of Artificial Sequence: Synthetic oligonucleotide"
  modified_base (21)..(21): Inverted abasic nucleotide
uuccugcuucaugccuuucun

SEQ ID NO: 770 - RNA, 23 nt, Artificial Sequence
  source: /note="Description of Artificial Sequence: Synthetic oligonucleotide"
uagaaaggcaugaagcaggaauu

SEQ ID NO: 771 - RNA, 22 nt, Artificial Sequence
  source: /note="Description of Artificial Sequence: Synthetic oligonucleotide"
  modified_base (1)..(1): Inverted abasic nucleotide
nuuccugcuucaugccuuucua

SEQ ID NO: 772 - RNA, 23 nt, Artificial Sequence
  source: /note="Description of Artificial Sequence: Synthetic oligonucleotide"
uagaaaggcaugaagcaggaauu

SEQ ID NO: 773 - RNA, 22 nt, Artificial Sequence
  source: /note="Description of Artificial Sequence: Synthetic oligonucleotide"
  modified_base (1)..(1): Inverted abasic nucleotide
nuuccugcuucaugccuuucua

SEQ ID NO: 774 - RNA, 23 nt, Artificial Sequence
  source: /note="Description of Artificial Sequence: Synthetic oligonucleotide"
uagaaaggcaugaagcaggaauu

SEQ ID NO: 775 - RNA, 22 nt, Artificial Sequence
  source: /note="Description of Artificial Sequence: Synthetic oligonucleotide"
  modified_base (1)..(1): Inverted abasic nucleotide
nuuccugcuucaugccuuucua

SEQ ID NO: 776 - RNA, 23 nt, Artificial Sequence
  source: /note="Description of Artificial Sequence: Synthetic oligonucleotide"
uagaaaggcaugaagcaggaauu

SEQ ID NO: 777 - RNA, 22 nt, Artificial Sequence
  source: /note="Description of Artificial Sequence: Synthetic oligonucleotide"
  modified_base (1)..(1): Inverted abasic nucleotide
nuuccugcuucaugccuuucua

SEQ ID NO: 778 - RNA, 23 nt, Artificial Sequence
  source: /note="Description of Artificial Sequence: Synthetic oligonucleotide"
uagaaaggcaugaagcaggaauu

SEQ ID NO: 779 - RNA, 22 nt, Artificial Sequence
  source: /note="Description of Artificial Sequence: Synthetic oligonucleotide"
  modified_base (1)..(1): Inverted abasic nucleotide
nuuccugcuucaugccuuucua

SEQ ID NO: 780 - RNA, 23 nt, Artificial Sequence
  source: /note="Description of Artificial Sequence: Synthetic oligonucleotide"
uagaaaggcaugaagcaggaauu

SEQ ID NO: 781 - RNA, 22 nt, Artificial Sequence
  source: /note="Description of Artificial Sequence: Synthetic oligonucleotide"
  modified_base (1)..(1): Inverted abasic nucleotide
nuuccugcuucaugccuuucua

SEQ ID NO: 782 - RNA, 23 nt, Artificial Sequence
  source: /note="Description of Artificial Sequence: Synthetic oligonucleotide"
uagaaaggcaugaagcaggaauu

SEQ ID NO: 783 - RNA, 22 nt, Artificial Sequence
  source: /note="Description of Artificial Sequence: Synthetic oligonucleotide"
  modified_base (1)..(1): Inverted abasic nucleotide
nucaugccuuucuacaguggcu

SEQ ID NO: 784 - RNA, 23 nt, Artificial Sequence
  source: /note="Description of Artificial Sequence: Synthetic oligonucleotide"
agccacuguagaaaggcaugauu

SEQ ID NO: 785 - RNA, 21 nt, Artificial Sequence
  source: /note="Description of Artificial Sequence: Synthetic oligonucleotide"
  modified_base (21)..(21): Inverted abasic nucleotide
ucaugccuuucuacaguggcn

SEQ ID NO: 786 - RNA, 23 nt, Artificial Sequence
  source: /note="Description of Artificial Sequence: Synthetic oligonucleotide"
agccacuguagaaaggcaugauu

SEQ ID NO: 787 - RNA, 22 nt, Artificial Sequence
  source: /note="Description of Artificial Sequence: Synthetic oligonucleotide"
  modified_base (1)..(1): Inverted abasic nucleotide
nucaugccuuucuacaguggcu

SEQ ID NO: 788 - RNA, 23 nt, Artificial Sequence
  source: /note="Description of Artificial Sequence: Synthetic oligonucleotide"
agccacuguagaaaggcaugauu

SEQ ID NO: 789 - RNA, 21 nt, Artificial Sequence
  source: /note="Description of Artificial Sequence: Synthetic oligonucleotide"
  modified_base (21)..(21): Inverted abasic nucleotide
ucaugccuuucuacaguggcn

SEQ ID NO: 790 - RNA, 23 nt, Artificial Sequence
  source: /note="Description of Artificial Sequence: Synthetic oligonucleotide"
agccacuguagaaaggcaugauu

SEQ ID NO: 791 - RNA, 22 nt, Artificial Sequence
  source: /note="Description of Artificial Sequence: Synthetic oligonucleotide"
  modified_base (1)..(1): Inverted abasic nucleotide
nucaugccuuucuacaguggcu

SEQ ID NO: 792 - RNA, 23 nt, Artificial Sequence
  source: /note="Description of Artificial Sequence: Synthetic oligonucleotide"
agccacuguagaaaggcaugauu

SEQ ID NO: 793 - RNA, 22 nt, Artificial Sequence
  source: /note="Description of Artificial Sequence: Synthetic oligonucleotide"
  modified_base (1)..(1): Inverted abasic nucleotide
nucaugccuuucuacaguggcu

SEQ ID NO: 794 - RNA, 23 nt, Artificial Sequence
  source: /note="Description of Artificial Sequence: Synthetic oligonucleotide"
agccacuguagaaaggcaugauu

SEQ ID NO: 795 - RNA, 21 nt, Artificial Sequence
  source: /note="Description of Artificial Sequence: Synthetic oligonucleotide"
  modified_base (21)..(21): Inverted abasic nucleotide
ucaugccuuucuacaguggcn

SEQ ID NO: 796 - RNA, 23 nt, Artificial Sequence
  source: /note="Description of Artificial Sequence: Synthetic oligonucleotide"
agccacuguagaaaggcaugauu

SEQ ID NO: 797 - RNA, 22 nt, Artificial Sequence
  source: /note="Description of Artificial Sequence: Synthetic oligonucleotide"
  modified_base (1)..(1): Inverted abasic nucleotide
nucaugccuuucuacaguggcu

SEQ ID NO: 798 - RNA, 23 nt, Artificial Sequence
  source: /note="Description of Artificial Sequence: Synthetic oligonucleotide"
agccacuguagaaaggcaugauu

SEQ ID NO: 799 - RNA, 22 nt, Artificial Sequence
  source: /note="Description of Artificial Sequence: Synthetic oligonucleotide"
  modified_base (1)..(1): Inverted abasic nucleotide
nucaugccuuucuacaguggcu

SEQ ID NO: 800 - RNA, 23 nt, Artificial Sequence
  source: /note="Description of Artificial Sequence: Synthetic oligonucleotide"
agccacuguagaaaggcaugauu

SEQ ID NO: 801 - RNA, 22 nt, Artificial Sequence
  source: /note="Description of Artificial Sequence: Synthetic oligonucleotide"
  modified_base (1)..(1): Inverted abasic nucleotide
nucaugccuuucuacaguggcu

SEQ ID NO: 802 - RNA, 23 nt, Artificial Sequence
  source: /note="Description of Artificial Sequence: Synthetic oligonucleotide"
agccacuguagaaaggcaugauu

SEQ ID NO: 803 - RNA, 22 nt, Artificial Sequence
  source: /note="Description of Artificial Sequence: Synthetic oligonucleotide"
  modified_base (1)..(1): Inverted abasic nucleotide
nugcuucaugccuuucuacagu

SEQ ID NO: 804 - RNA, 23 nt, Artificial Sequence
  source: /note="Description of Artificial Sequence: Synthetic oligonucleotide"
acuguagaaaggcaugaagcauu

SEQ ID NO: 805 - RNA, 21 nt, Artificial Sequence
  source: /note="Description of Artificial Sequence: Synthetic oligonucleotide"
  modified_base (21)..(21): Inverted abasic nucleotide
ugcuucaugccuuucuacagn

SEQ ID NO: 806 - RNA, 23 nt, Artificial Sequence
  source: /note="Description of Artificial Sequence: Synthetic oligonucleotide"
acuguagaaaggcaugaagcauu

SEQ ID NO: 807 - RNA, 21 nt, Artificial Sequence
  source: /note="Description of Artificial Sequence: Synthetic oligonucleotide"
  modified_base (21)..(21): Inverted abasic nucleotide
ugcuucaugccuuucuacagn

SEQ ID NO: 808 - RNA, 23 nt, Artificial Sequence
  source: /note="Description of Artificial Sequence: Synthetic oligonucleotide"
acuguagaaaggcaugaagcauu

SEQ ID NO: 809 - RNA, 22 nt, Artificial Sequence
  source: /note="Description of Artificial Sequence: Synthetic oligonucleotide"
  modified_base (1)..(1): Inverted abasic nucleotide
nugcuucaugccuuucuacagu

SEQ ID NO: 810 - RNA, 23 nt, Artificial Sequence
  source: /note="Description of Artificial Sequence: Synthetic oligonucleotide"
acuguagaaaggcaugaagcauu

SEQ ID NO: 811 - RNA, 22 nt, Artificial Sequence
  source: /note="Description of Artificial Sequence: Synthetic oligonucleotide"
  modified_base (1)..(1): Inverted abasic nucleotide
ncuucaugccuuucuacaguuu

SEQ ID NO: 812 - RNA, 21 nt, Artificial Sequence
  source: /note="Description of Artificial Sequence: Synthetic oligonucleotide"
acuguagaaaggcaugaaguu

SEQ ID NO: 813 - RNA, 22 nt, Artificial Sequence
  source: /note="Description of Artificial Sequence: Synthetic oligonucleotide"
  modified_base (1)..(1): Inverted abasic nucleotide
nugcuucaugccuuucuacagu

SEQ ID NO: 814 - RNA, 23 nt, Artificial Sequence
  source: /note="Description of Artificial Sequence: Synthetic oligonucleotide"
acuguagaaaggcaugaagcauu

SEQ ID NO: 815 - RNA, 22 nt, Artificial Sequence
  source: /note="Description of Artificial Sequence: Synthetic oligonucleotide"
  modified_base (1)..(1): Inverted abasic nucleotide
ngcuucaugccuuucuacauuu

SEQ ID NO: 816 - RNA, 21 nt, Artificial Sequence
  source: /note="Description of Artificial Sequence: Synthetic oligonucleotide"
auguagaaaggcaugaagcuu

SEQ ID NO: 817 - RNA, 22 nt, Artificial Sequence
  source: /note="Description of Artificial Sequence: Synthetic oligonucleotide"
  modified_base (1)..(1): Inverted abasic nucleotide
ncaugccuuucuacagugguuu

SEQ ID NO: 818 - RNA, 21 nt, Artificial Sequence
  source: /note="Description of Artificial Sequence: Synthetic oligonucleotide"
accacuguagaaaggcauguu

SEQ ID NO: 819 - RNA, 22 nt, Artificial Sequence
  source: /note="Description of Artificial Sequence: Synthetic oligonucleotide"
  modified_base (1)..(1): Inverted abasic nucleotide
ncugcuucaugccuuucuaauu

SEQ ID NO: 820 - RNA, 21 nt, Artificial Sequence
  source: /note="Description of Artificial Sequence: Synthetic oligonucleotide"
uuagaaaggcaugaagcaguu

SEQ ID NO: 821 - RNA, 22 nt, Artificial Sequence
  source: /note="Description of Artificial Sequence: Synthetic oligonucleotide"
  modified_base (1)..(1): Inverted abasic nucleotide
ngcuucaugccuuucuacaauu

SEQ ID NO: 822 - RNA, 21 nt, Artificial Sequence
  source: /note="Description of Artificial Sequence: Synthetic oligonucleotide"
uuguagaaaggcaugaagcuu

SEQ ID NO: 823 - RNA, 22 nt, Artificial Sequence
  source: /note="Description of Artificial Sequence: Synthetic oligonucleotide"
  modified_base (1)..(1): Inverted abasic nucleotide
nuucaugccuuucuacaguauu

SEQ ID NO: 824 - RNA, 21 nt, Artificial Sequence
  source: /note="Description of Artificial Sequence: Synthetic oligonucleotide"
uacuguagaaaggcaugaauu

SEQ ID NO: 825 - RNA, 22 nt, Artificial Sequence
  source: /note="Description of Artificial Sequence: Synthetic oligonucleotide"
  modified_base (1)..(1): Inverted abasic nucleotide
nguuccugcuucaugccuuuuu

SEQ ID NO: 826 - RNA, 21 nt, Artificial Sequence
  source: /note="Description of Artificial Sequence: Synthetic oligonucleotide"
aaaggcaugaagcaggaacuu

SEQ ID NO: 827 - RNA, 21 nt, Artificial Sequence
  source: /note="Description of Artificial Sequence: Synthetic oligonucleotide"
  modified_base (21)..(21): Inverted abasic nucleotide
auguuccugcuucaugccuun

SEQ ID NO: 828 - RNA, 23 nt, Artificial Sequence
  source: /note="Description of Artificial Sequence: Synthetic oligonucleotide"
aaaggcaugaagcaggaacauuu

SEQ ID NO: 829 - RNA, 22 nt, Artificial Sequence
  source: /note="Description of Artificial Sequence: Synthetic oligonucleotide"
  modified_base (1)..(1): Inverted abasic nucleotide
nauguuccugcuucaugccuuu

SEQ ID NO: 830 - RNA, 23 nt, Artificial Sequence
  source: /note="Description of Artificial Sequence: Synthetic oligonucleotide"
aaaggcaugaagcaggaacauuu

SEQ ID NO: 831 - RNA, 22 nt, Artificial Sequence
  source: /note="Description of Artificial Sequence: Synthetic oligonucleotide"
  modified_base (1)..(1): Inverted abasic nucleotide
nguuccugcuucaugccuuuuu

SEQ ID NO: 832 - RNA, 21 nt, Artificial Sequence
  source: /note="Description of Artificial Sequence: Synthetic oligonucleotide"
aaaggcaugaagcaggaacuu

SEQ ID NO: 833 - RNA, 21 nt, Artificial Sequence
  source: /note="Description of Artificial Sequence: Synthetic oligonucleotide"
  modified_base (21)..(21): Inverted abasic nucleotide
auguuccugcuucaugccuun

SEQ ID NO: 834 - RNA, 23 nt, Artificial Sequence
  source: /note="Description of Artificial Sequence: Synthetic oligonucleotide"
aaaggcaugaagcaggaacauuu

SEQ ID NO: 835 - RNA, 22 nt, Artificial Sequence
  source: /note="Description of Artificial Sequence: Synthetic oligonucleotide"
  modified_base (1)..(1): Inverted abasic nucleotide
nauguuccugcuucaugccuuu

SEQ ID NO: 836 - RNA, 23 nt, Artificial Sequence
  source: /note="Description of Artificial Sequence: Synthetic oligonucleotide"
aaaggcaugaagcaggaacauuu

SEQ ID NO: 837 - RNA, 22 nt, Artificial Sequence
  source: /note="Description of Artificial Sequence: Synthetic oligonucleotide"
  modified_base (1)..(1): Inverted abasic nucleotide
nguuccugcuucaugccuuuuu

SEQ ID NO: 838 - RNA, 21 nt, Artificial Sequence
  source: /note="Description of Artificial Sequence: Synthetic oligonucleotide"
aaaggcaugaagcaggaacuu

SEQ ID NO: 839 - RNA, 21 nt, Artificial Sequence
  source: /note="Description of Artificial Sequence: Synthetic oligonucleotide"
  modified_base (21)..(21): Inverted abasic nucleotide
auguuccugcuucaugccuun

SEQ ID NO: 840 - RNA, 23 nt, Artificial Sequence
  source: /note="Description of Artificial Sequence: Synthetic oligonucleotide"
aaaggcaugaagcaggaacauuu

SEQ ID NO: 841 - RNA, 22 nt, Artificial Sequence
  source: /note="Description of Artificial Sequence: Synthetic oligonucleotide"
  modified_base (1)..(1): Inverted abasic nucleotide
nauguuccugcuucaugccuuu

SEQ ID NO: 842 - RNA, 23 nt, Artificial Sequence
  source: /note="Description of Artificial Sequence: Synthetic oligonucleotide"
aaaggcaugaagcaggaacauuu

SEQ ID NO: 843 - RNA, 22 nt, Artificial Sequence
  source: /note="Description of Artificial Sequence: Synthetic oligonucleotide"
  modified_base (1)..(1): Inverted abasic nucleotide
nauguuccugcuucaugccuuu

SEQ ID NO: 844 - RNA, 23 nt, Artificial Sequence
  source: /note="Description of Artificial Sequence: Synthetic oligonucleotide"
aaaggcaugaagcaggaacauuu

SEQ ID NO: 845 - RNA, 22 nt, Artificial Sequence
  source: /note="Description of Artificial Sequence: Synthetic oligonucleotide"
  modified_base (1)..(1): Inverted abasic nucleotide
nauguuccugcuucaugccuuu

SEQ ID NO: 846 - RNA, 23 nt, Artificial Sequence
  source: /note="Description of Artificial Sequence: Synthetic oligonucleotide"
aaaggcaugaagcaggaacauuu

SEQ ID NO: 847 - RNA, 22 nt, Artificial Sequence
  source: /note="Description of Artificial Sequence: Synthetic oligonucleotide"
  modified_base (1)..(1): Inverted abasic nucleotide
ngcuucaugccuuucuacagua

SEQ ID NO: 848 - RNA, 23 nt, Artificial Sequence
  source: /note="Description of Artificial Sequence: Synthetic oligonucleotide"
uacuguagaaaggcaugaagcuu

SEQ ID NO: 849 - RNA, 22 nt, Artificial Sequence
  source: /note="Description of Artificial Sequence: Synthetic oligonucleotide"
  modified_base (1)..(1): Inverted abasic nucleotide
ngcuucaugccuuucuacagua

SEQ ID NO: 850 - RNA, 23 nt, Artificial Sequence
  source: /note="Description of Artificial Sequence: Synthetic oligonucleotide"
uacuguagaaaggcaugaagcuu

SEQ ID NO: 851 - RNA, 22 nt, Artificial Sequence
  source: /note="Description of Artificial Sequence: Synthetic oligonucleotide"
  modified_base (1)..(1): Inverted abasic nucleotide
nuucaugccuuucuacaguauu

SEQ ID NO: 852 - RNA, 21 nt, Artificial Sequence
  source: /note="Description of Artificial Sequence: Synthetic oligonucleotide"
uacuguagaaaggcaugaauu

SEQ ID NO: 853 - RNA, 22 nt, Artificial Sequence
  source: /note="Description of Artificial Sequence: Synthetic oligonucleotide"
  modified_base (1)..(1): Inverted abasic nucleotide
ngcuucaugccuuucuacagua

SEQ ID NO: 854 - RNA, 23 nt, Artificial Sequence
  source: /note="Description of Artificial Sequence: Synthetic oligonucleotide"
uacuguagaaaggcaugaagcuu

SEQ ID NO: 855 - RNA, 21 nt, Artificial Sequence
  source: /note="Description of Artificial Sequence: Synthetic oligonucleotide"
  modified_base (21)..(21): Inverted abasic nucleotide
gcuucaugccuuucuacagun

SEQ ID NO: 856 - RNA, 23 nt, Artificial Sequence
  source: /note="Description of Artificial Sequence: Synthetic oligonucleotide"
uacuguagaaaggcaugaagcuu

SEQ ID NO: 857 - RNA, 22 nt, Artificial Sequence
  source: /note="Description of Artificial Sequence: Synthetic oligonucleotide"
  modified_base (1)..(1): Inverted abasic nucleotide
ngcggcuuccugggcuucuauu

SEQ ID NO: 858 - RNA, 21 nt, Artificial Sequence
  source: /note="Description of Artificial Sequence: Synthetic oligonucleotide"
uagaagcccaggaagccgcuu

SEQ ID NO: 859 - RNA, 22 nt, Artificial Sequence
  source: /note="Description of Artificial Sequence: Synthetic oligonucleotide"
  modified_base (1)..(1): Inverted abasic nucleotide
nauggcuuccagauaugccuuu

SEQ ID NO: 860 - RNA, 21 nt, Artificial Sequence
  source: /note="Description of Artificial Sequence: Synthetic oligonucleotide"
aggcauaucuggaagccauuu

SEQ ID NO: 861 - RNA, 22 nt, Artificial Sequence
  source: /note="Description of Artificial Sequence: Synthetic oligonucleotide"
  modified_base (1)..(1): Inverted abasic nucleotide
nacauggcuuccagauaugccu

SEQ ID NO: 862 - RNA, 23 nt, Artificial Sequence
  source: /note="Description of Artificial Sequence: Synthetic oligonucleotide"
aggcauaucuggaagccauguuu

SEQ ID NO: 863 - RNA, 22 nt, Artificial Sequence
  source: /note="Description of Artificial Sequence: Synthetic oligonucleotide"
  modified_base (1)..(1): Inverted abasic nucleotide
nacauggcuuccagauaugccu

SEQ ID NO: 864 - RNA, 23 nt, Artificial Sequence
  source: /note="Description of Artificial Sequence: Synthetic oligonucleotide"
aggcauaucuggaagccauguuu

SEQ ID NO: 865 - RNA, 22 nt, Artificial Sequence
  source: /note="Description of Artificial Sequence: Synthetic oligonucleotide"
  modified_base (1)..(1): Inverted abasic nucleotide
ncaacguacccuucauugaugu

SEQ ID NO: 866 - RNA, 23 nt, Artificial Sequence
  source: /note="Description of Artificial Sequence: Synthetic oligonucleotide"
acaucaaugaaggguacguuguu

SEQ ID NO: 867 - RNA, 22 nt, Artificial Sequence
  source: /note="Description of Artificial Sequence: Synthetic oligonucleotide"
  modified_base (1)..(1): Inverted abasic nucleotide
ncaacguacccuucauugaugu

SEQ ID NO: 868 - RNA, 23 nt, Artificial Sequence
  source: /note="Description of Artificial Sequence: Synthetic oligonucleotide"
acaucaaugaaggguacguuguu

SEQ ID NO: 869 - RNA, 22 nt, Artificial Sequence
  source: /note="Description of Artificial Sequence: Synthetic oligonucleotide"
  modified_base (1)..(1): Inverted abasic nucleotide
nacguacccuucauugauguuu

SEQ ID NO: 870 - RNA, 21 nt, Artificial Sequence
  source: /note="Description of Artificial Sequence: Synthetic oligonucleotide"
acaucaaugaaggguacguuu

SEQ ID NO: 871 - RNA, 21 nt, Artificial Sequence
  source: /note="Description of Artificial Sequence: Synthetic oligonucleotide"
  modified_base (21)..(21): Inverted abasic nucleotide
cugcuucaugccuuucuacan

SEQ ID NO: 872 - RNA, 23 nt, Artificial Sequence
  source: /note="Description of Artificial Sequence: Synthetic oligonucleotide"
auguagaaaggcaugaagcaguu

SEQ ID NO: 873 - RNA, 22 nt, Artificial Sequence
  source: /note="Description of Artificial Sequence: Synthetic oligonucleotide"
  modified_base (1)..(1): Inverted abasic nucleotide
ncugcuucaugccuuucuacau

SEQ ID NO: 874 - RNA, 23 nt, Artificial Sequence
  source: /note="Description of Artificial Sequence: Synthetic oligonucleotide"
auguagaaaggcaugaagcaguu

SEQ ID NO: 875 - RNA, 22 nt, Artificial Sequence
  source: /note="Description of Artificial Sequence: Synthetic oligonucleotide"
  modified_base (1)..(1): Inverted abasic nucleotide
ngcuucaugccuuucuacauuu

SEQ ID NO: 876 - RNA, 21 nt, Artificial Sequence
  source: /note="Description of Artificial Sequence: Synthetic oligonucleotide"
auguagaaaggcaugaagcuu

SEQ ID NO: 877 - RNA, 21 nt, Artificial Sequence
  source: /note="Description of Artificial Sequence: Synthetic oligonucleotide"
  modified_base (21)..(21): Inverted abasic nucleotide
cugcuucaugccuuucuacan

SEQ ID NO: 878 - RNA, 23 nt, Artificial Sequence
  source: /note="Description of Artificial Sequence: Synthetic oligonucleotide"
auguagaaaggcaugaagcaguu

SEQ ID NO: 879 - RNA, 22 nt, Artificial Sequence
  source: /note="Description of Artificial Sequence: Synthetic oligonucleotide"
  modified_base (1)..(1): Inverted abasic nucleotide
ncugcuucaugccuuucuacau

SEQ ID NO: 880 - RNA, 23 nt, Artificial Sequence
  source: /note="Description of Artificial Sequence: Synthetic oligonucleotide"
auguagaaaggcaugaagcaguu

SEQ ID NO: 881 - RNA, 21 nt, Artificial Sequence
  source: /note="Description of Artificial Sequence: Synthetic oligonucleotide"
  modified_base (21)..(21): Inverted abasic nucleotide
cugcuucaugccuuucuacan

SEQ ID NO: 882 - RNA, 23 nt, Artificial Sequence
  source: /note="Description of Artificial Sequence: Synthetic oligonucleotide"
auguagaaaggcaugaagcaguu

SEQ ID NO: 883 - RNA, 22 nt, Artificial Sequence
  source: /note="Description of Artificial Sequence: Synthetic oligonucleotide"
  modified_base (1)..(1): Inverted abasic nucleotide
  modified_base (22)..(22): Inverted abasic nucleotide
ncugcuucaugccuuucuacan

SEQ ID NO: 884 - RNA, 23 nt, Artificial Sequence
  source: /note="Description of Artificial Sequence: Synthetic oligonucleotide"
auguagaaaggcaugaagcaguu

SEQ ID NO: 885 - RNA, 22 nt, Artificial Sequence
  source: /note="Description of Artificial Sequence: Synthetic oligonucleotide"
  modified_base (1)..(1): Inverted abasic nucleotide
ngcuucaugccuuucuacauuu

SEQ ID NO: 886 - RNA, 21 nt, Artificial Sequence
  source: /note="Description of Artificial Sequence: Synthetic oligonucleotide"
auguagaaaggcaugaagcuu

SEQ ID NO: 887 - RNA, 22 nt, Artificial Sequence
  source: /note="Description of Artificial Sequence: Synthetic oligonucleotide"
  modified_base (1)..(1): Inverted abasic nucleotide
ncuucaugccuuucuacaguuu

SEQ ID NO: 888 - RNA, 21 nt, Artificial Sequence
  source: /note="Description of Artificial Sequence: Synthetic oligonucleotide"
acuguagaaaggcaugaaguu

SEQ ID NO: 889 - RNA, 21 nt, Artificial Sequence
  source: /note="Description of Artificial Sequence: Synthetic oligonucleotide"
  modified_base (21)..(21): Inverted abasic nucleotide
ugcuucaugccuuucuacagn

SEQ ID NO: 890 - RNA, 23 nt, Artificial Sequence
  source: /note="Description of Artificial Sequence: Synthetic oligonucleotide"
acuguagaaaggcaugaagcauu

SEQ ID NO: 891 - RNA, 22 nt, Artificial Sequence
  source: /note="Description of Artificial Sequence: Synthetic oligonucleotide"
  modified_base (1)..(1): Inverted abasic nucleotide
ncugcuucaugccuuucuacau

SEQ ID NO: 892 - RNA, 23 nt, Artificial Sequence
  source: /note="Description of Artificial Sequence: Synthetic oligonucleotide"
auguagaaaggcaugaagcaguu

SEQ ID NO: 893 - RNA, 21 nt, Artificial Sequence
  source: /note="Description of Artificial Sequence: Synthetic oligonucleotide"
  modified_base (21)..(21): Inverted abasic nucleotide
cugcuucaugccuuucuacan

SEQ ID NO: 894 - RNA, 23 nt, Artificial Sequence
  source: /note="Description of Artificial Sequence: Synthetic oligonucleotide"
auguagaaaggcaugaagcaguu

SEQ ID NO: 895 - RNA, 21 nt, Artificial Sequence
  source: /note="Description of Artificial Sequence: Synthetic oligonucleotide"
  modified_base (21)..(21): Inverted abasic nucleotide
cugcuucaugccuuucuacan

SEQ ID NO: 896 - RNA, 23 nt, Artificial Sequence
  source: /note="Description of Artificial Sequence: Synthetic oligonucleotide"
auguagaaaggcaugaagcaguu

SEQ ID NO: 897 - RNA, 22 nt, Artificial Sequence
  source: /note="Description of Artificial Sequence: Synthetic oligonucleotide"
  modified_base (1)..(1): Inverted abasic nucleotide
ncuucaucccuuucuacaguuu

SEQ ID NO: 898 - RNA, 21 nt, Artificial Sequence
  source: /note="Description of Artificial Sequence: Synthetic oligonucleotide"
acuguagaaagggaugaaguu

SEQ ID NO: 899 - RNA, 22 nt, Artificial Sequence
  source: /note="Description of Artificial Sequence: Synthetic oligonucleotide"
  modified_base (1)..(1): Inverted abasic nucleotide
ngcuucaucccuuucuacauuu

SEQ ID NO: 900 - RNA, 21 nt, Artificial Sequence
  source: /note="Description of Artificial Sequence: Synthetic oligonucleotide"
auguagaaagggaugaagcuu

SEQ ID NO: 901 - RNA, 21 nt, Artificial Sequence
  source: /note="Description of Artificial Sequence: Synthetic oligonucleotide"
  modified_base (21)..(21): Inverted abasic nucleotide
ugcuucaucccuuucuacagn

SEQ ID NO: 902 - RNA, 23 nt, Artificial Sequence
  source: /note="Description of Artificial Sequence: Synthetic oligonucleotide"
acuguagaaagggaugaagcauu

SEQ ID NO: 903 - RNA, 21 nt, Artificial Sequence
  source: /note="Description of Artificial Sequence: Synthetic oligonucleotide"
  modified_base (21)..(21): Inverted abasic nucleotide
cugcuucaucccuuucuacan

SEQ ID NO: 904 - RNA, 23 nt, Artificial Sequence
  source: /note="Description of Artificial Sequence: Synthetic oligonucleotide"
auguagaaagggaugaagcaguu

SEQ ID NO: 905 - RNA, 22 nt, Artificial Sequence
  source: /note="Description of Artificial Sequence: Synthetic oligonucleotide"
  modified_base (1)..(1): Inverted abasic nucleotide
nacauugcucuuucaccugauu

SEQ ID NO: 906 - RNA, 21 nt, Artificial Sequence
  source: /note="Description of Artificial Sequence: Synthetic oligonucleotide"
ucaggugaaagagcaauguuu

SEQ ID NO: 907 - RNA, 21 nt, Artificial Sequence
  source: /note="Description of Artificial Sequence: Synthetic oligonucleotide"
  modified_base (21)..(21): Inverted abasic nucleotide
cugcuucaugccuuucuacan

SEQ ID NO: 908 - RNA, 23 nt, Artificial Sequence
  source: /note="Description of Artificial Sequence: Synthetic oligonucleotide"
auguagaaaggcaugaagcaguu

SEQ ID NO: 909 - RNA, 21 nt, Artificial Sequence
  source: /note="Description of Artificial Sequence: Synthetic oligonucleotide"
  modified_base (21)..(21): Inverted abasic nucleotide
cugcuucaugccuuucuacan

SEQ ID NO: 910 - RNA, 23 nt, Artificial Sequence
  source: /note="Description of Artificial Sequence: Synthetic oligonucleotide"
auguagaaaggcaugaagcaguu

SEQ ID NO: 911 - RNA, 21 nt, Artificial Sequence
  source: /note="Description of Artificial Sequence: Synthetic oligonucleotide"
  modified_base (21)..(21): Inverted abasic nucleotide
cugcuucaugccuuucuacan

SEQ ID NO: 912 - RNA, 23 nt, Artificial Sequence
  source: /note="Description of Artificial Sequence: Synthetic oligonucleotide"
auguagaaaggcaugaagcaguu

SEQ ID NO: 913 - RNA, 21 nt, Artificial Sequence
  source: /note="Description of Artificial Sequence: Synthetic oligonucleotide"
  modified_base (21)..(21): Inverted abasic nucleotide
cugcuucaugccuuucuacan

SEQ ID NO: 914 - RNA, 23 nt, Artificial Sequence
  source: /note="Description of Artificial Sequence: Synthetic oligonucleotide"
auguagaaaggcaugaagcaguu

SEQ ID NO: 915 - RNA, 21 nt, Artificial Sequence
  source: /note="Description of Artificial Sequence: Synthetic oligonucleotide"
  modified_base (21)..(21): Inverted abasic nucleotide
cugcuucaugccuuucuacan

SEQ ID NO: 916 - RNA, 23 nt, Artificial Sequence
  source: /note="Description of Artificial Sequence: Synthetic oligonucleotide"
auguagaaaggcaugaagcaguu

SEQ ID NO: 917 - RNA, 21 nt, Artificial Sequence
  source: /note="Description of Artificial Sequence: Synthetic oligonucleotide"
  modified_base (21)..(21): Inverted abasic nucleotide
cugcuucaugccuuucuacan

SEQ ID NO: 918 - RNA, 23 nt, Artificial Sequence
  source: /note="Description of Artificial Sequence: Synthetic oligonucleotide"
auguagaaaggcaugaagcaguu

SEQ ID NO: 919 - RNA, 21 nt, Artificial Sequence
  source: /note="Description of Artificial Sequence: Synthetic oligonucleotide"
  modified_base (21)..(21): Inverted abasic nucleotide
cugcuucaugccuuucuacan

SEQ ID NO: 920 - RNA, 23 nt, Artificial Sequence
  source: /note="Description of Artificial Sequence: Synthetic oligonucleotide"
auguagaaaggcaugaagcaguu

SEQ ID NO: 921 - RNA, 21 nt, Artificial Sequence
  source: /note="Description of Artificial Sequence: Synthetic oligonucleotide"
  modified_base (21)..(21): Inverted abasic nucleotide
cugcuucaugccuuucuacan

SEQ ID NO: 922 - RNA, 23 nt, Artificial Sequence
  source: /note="Description of Artificial Sequence: Synthetic oligonucleotide"
auguagaaaggcaugaagcaguu

SEQ ID NO: 923 - RNA, 21 nt, Artificial Sequence
  source: /note="Description of Artificial Sequence: Synthetic oligonucleotide"
  modified_base (21)..(21): Inverted abasic nucleotide
cugcuucaugccuuucuacan

SEQ ID NO: 924 - RNA, 23 nt, Artificial Sequence
  source: /note="Description of Artificial Sequence: Synthetic oligonucleotide"
auguagaaaggcaugaagcaguu

SEQ ID NO: 925 - RNA, 21 nt, Artificial Sequence
  source: /note="Description of Artificial Sequence: Synthetic oligonucleotide"
  modified_base (21)..(21): Inverted abasic nucleotide
cugcuucaugccuuucuacan

SEQ ID NO: 926 - RNA, 23 nt, Artificial Sequence
  source: /note="Description of Artificial Sequence: Synthetic oligonucleotide"
auguagaaaggcaugaagcaguu

SEQ ID NO: 927 - RNA, 21 nt, Artificial Sequence
  source: /note="Description of Artificial Sequence: Synthetic oligonucleotide"
  modified_base (21)..(21): Inverted abasic nucleotide
cugcuucaugccuuucuacan

SEQ ID NO: 928 - RNA, 23 nt, Artificial Sequence
  source: /note="Description of Artificial Sequence: Synthetic oligonucleotide"
auguagaaaggcaugaagcaguu

SEQ ID NO: 929 - DNA, 22 bp, Artificial Sequence
  source: /note="Description of Artificial Sequence: Synthetic oligonucleotide"
  source: /note="Description of Combined DNA/RNA Molecule: Synthetic oligonucleotide"
  modified_base (1)..(1): Inverted abasic nucleotide
ncuucaugcctuucuacaguuu

SEQ ID NO: 930 - RNA, 21 nt, Artificial Sequence
  source: /note="Description of Artificial Sequence: Synthetic oligonucleotide"
acuguagaaaggcaugaaguu

SEQ ID NO: 931 - RNA, 22 nt, Artificial Sequence
  source: /note="Description of Artificial Sequence: Synthetic oligonucleotide"
  modified_base (1)..(1): Inverted abasic nucleotide
ncuucaugccuuucuacaguuu

SEQ ID NO: 932 - RNA, 21 nt, Artificial Sequence
  source: /note="Description of Artificial Sequence: Synthetic oligonucleotide"
acuguagaaaggcaugaaguu

SEQ ID NO: 933 - RNA, 22 nt, Artificial Sequence
  source: /note="Description of Artificial Sequence: Synthetic oligonucleotide"
  modified_base (1)..(1): Inverted abasic nucleotide
ncuucaugccuuucuacaguuu

SEQ ID NO: 934 - RNA, 21 nt, Artificial Sequence
  source: /note="Description of Artificial Sequence: Synthetic oligonucleotide"
acuguagaaaggcaugaaguu

SEQ ID NO: 935 - RNA, 22 nt, Artificial Sequence
  source: /note="Description of Artificial Sequence: Synthetic oligonucleotide"
  modified_base (1)..(1): Inverted abasic nucleotide
ncuucaugccuuucuacaguuu

SEQ ID NO: 936 - RNA, 21 nt, Artificial Sequence
  source: /note="Description of Artificial Sequence: Synthetic oligonucleotide"
acuguagaaaggcaugaaguu

SEQ ID NO: 937 - RNA, 22 nt, Artificial Sequence
  source: /note="Description of Artificial Sequence: Synthetic oligonucleotide"
  modified_base (1)..(1): Inverted abasic nucleotide
ncuucaugccuuucuacaguuu

SEQ ID NO: 938 - RNA, 21 nt, Artificial Sequence
  source: /note="Description of Artificial Sequence: Synthetic oligonucleotide"
acuguagaaaggcaugaaguu

SEQ ID NO: 939 - DNA, 22 bp, Artificial Sequence
  source: /note="Description of Artificial Sequence: Synthetic oligonucleotide"
  source: /note="Description of Combined DNA/RNA Molecule: Synthetic oligonucleotide"
  modified_base (1)..(1): Inverted abasic nucleotide
ncuucaugccuuucuacaguuu

SEQ ID NO: 940 - RNA, 21 nt, Artificial Sequence
  source: /note="Description of Artificial Sequence: Synthetic oligonucleotide"
acuguagaaaggcaugaaguu

SEQ ID NO: 941 - DNA, 22 bp, Artificial Sequence
  source: /note="Description of Artificial Sequence: Synthetic oligonucleotide"
  source: /note="Description of Combined DNA/RNA Molecule: Synthetic oligonucleotide"
  modified_base (1)..(1): Inverted abasic nucleotide
ncuucaugccutucuacaguuu

SEQ ID NO: 942 - RNA, 21 nt, Artificial Sequence
  source: /note="Description of Artificial Sequence: Synthetic oligonucleotide"
acuguagaaaggcaugaaguu

SEQ ID NO: 943 - RNA, 22 nt, Artificial Sequence
  source: /note="Description of Artificial Sequence: Synthetic oligonucleotide"
  modified_base (1)..(1): Inverted abasic nucleotide
ngcuucaugggauucuacauuu

SEQ ID NO: 944 - RNA, 21 nt, Artificial Sequence
  source: /note="Description of Artificial Sequence: Synthetic oligonucleotide"
auguagaaucccaugaagcuu

SEQ ID NO: 945 - RNA, 22 nt, Artificial Sequence
  source: /note="Description of Artificial Sequence: Synthetic oligonucleotide"
  modified_base (1)..(1): Inverted abasic nucleotide
ncuucaugcgaaucuacaguuu

SEQ ID NO: 946 - RNA, 21 nt, Artificial Sequence
  source: /note="Description of Artificial Sequence: Synthetic oligonucleotide"
acuguagauucgcaugaaguu

SEQ ID NO: 947 - RNA, 21 nt, Artificial Sequence
  source: /note="Description of Artificial Sequence: Synthetic oligonucleotide"
  modified_base (21)..(21): Inverted abasic nucleotide
cugcuucaugccuuucuacan

SEQ ID NO: 948 - RNA, 23 nt, Artificial Sequence
  source: /note="Description of Artificial Sequence: Synthetic oligonucleotide"
uuguagaaaggcaugaagcaguu

SEQ ID NO: 949 - RNA, 22 nt, Artificial Sequence
  source: /note="Description of Artificial Sequence: Synthetic oligonucleotide"
  modified_base (1)..(1): Inverted abasic nucleotide
ncugcuucaugccuuucuacaa

SEQ ID NO: 950 - RNA, 23 nt, Artificial Sequence
  source: /note="Description of Artificial Sequence: Synthetic oligonucleotide"
uuguagaaaggcaugaagcaguu

SEQ ID NO: 951 - DNA, 21 bp, Artificial Sequence
  source: /note="Description of Artificial Sequence: Synthetic oligonucleotide"
  source: /note="Description of Combined DNA/RNA Molecule: Synthetic oligonucleotide"
cugcuucaugccuuucuacaa

SEQ ID NO: 952 - RNA, 23 nt, Artificial Sequence
  source: /note="Description of Artificial Sequence: Synthetic oligonucleotide"
uuguagaaaggcaugaagcaguu

SEQ ID NO: 953 - RNA, 21 nt, Artificial Sequence
  source: /note="Description of Artificial Sequence: Synthetic oligonucleotide"
  modified_base (21)..(21): Inverted abasic nucleotide
cugcuucaugggauucuacan

SEQ ID NO: 954 - RNA, 23 nt, Artificial Sequence
  source: /note="Description of Artificial Sequence: Synthetic oligonucleotide"
auguagaaucccaugaagcaguu

SEQ ID NO: 955 - RNA, 22 nt, Artificial Sequence
  source: /note="Description of Artificial Sequence: Synthetic oligonucleotide"
  modified_base (1)..(1): Inverted abasic nucleotide
ncugcuucaugggauucuacau

SEQ ID NO: 956 - RNA, 23 nt, Artificial Sequence
  source: /note="Description of Artificial Sequence: Synthetic oligonucleotide"
auguagaaucccaugaagcaguu

SEQ ID NO: 957 - RNA, 22 nt, Artificial Sequence
  source: /note="Description of Artificial Sequence: Synthetic oligonucleotide"
  modified_base (1)..(1): Inverted abasic nucleotide
ncuucaugccuuucuacaguuu

SEQ ID NO: 958 - RNA, 21 nt, Artificial Sequence
  source: /note="Description of Artificial Sequence: Synthetic oligonucleotide"
acuguagaaaggcaugaaguu

SEQ ID NO: 959 - RNA, 22 nt, Artificial Sequence
  source: /note="Description of Artificial Sequence: Synthetic oligonucleotide"
  modified_base (1)..(1): Inverted abasic nucleotide
ncuucaugccuuucuacaguuu

SEQ ID NO: 960 - RNA, 21 nt, Artificial Sequence
  source: /note="Description of Artificial Sequence: Synthetic oligonucleotide"
acuguagaaaggcaugaaguu

SEQ ID NO: 961 - RNA, 22 nt, Artificial Sequence
  source: /note="Description of Artificial Sequence: Synthetic oligonucleotide"
  modified_base (1)..(1): Inverted abasic nucleotide
ngcuucaugccuuucuacauuu

SEQ ID NO: 962 - RNA, 21 nt, Artificial Sequence
  source: /note="Description of Artificial Sequence: Synthetic oligonucleotide"
auguagaaaggcaugaagcuu

SEQ ID NO: 963 - RNA, 22 nt, Artificial Sequence
  source: /note="Description of Artificial Sequence: Synthetic oligonucleotide"
  modified_base (1)..(1): Inverted abasic nucleotide
  modified_base (22)..(22): Inverted abasic nucleotide
nugcuucaugccuuucuacagn

SEQ ID NO: 964 - RNA, 23 nt, Artificial Sequence
  source: /note="Description of Artificial Sequence: Synthetic oligonucleotide"
acuguagaaaggcaugaagcauu

SEQ ID NO: 965 - RNA, 22 nt, Artificial Sequence
  source: /note="Description of Artificial Sequence: Synthetic oligonucleotide"
  modified_base (1)..(1): Inverted abasic nucleotide
ncuucaugccuuucuacaguuu

SEQ ID NO: 966 - RNA, 21 nt, Artificial Sequence
  source: /note="Description of Artificial Sequence: Synthetic oligonucleotide"
acuguagaaaggcaugaaguu

SEQ ID NO: 967 - RNA, 21 nt, Artificial Sequence
  source: /note="Description of Artificial Sequence: Synthetic oligonucleotide"
  modified_base (21)..(21): Inverted abasic nucleotide
ugcuucaugccuuucuacagn

SEQ ID NO: 968 - RNA, 23 nt, Artificial Sequence
  source: /note="Description of Artificial Sequence: Synthetic oligonucleotide"
acuguagaaaggcaugaagcauu

SEQ ID NO: 969 - RNA, 21 nt, Artificial Sequence
  source: /note="Description of Artificial Sequence: Synthetic oligonucleotide"
  modified_base (21)..(21): Inverted abasic nucleotide
ugcuucaugccuuucuacagn

SEQ ID NO: 970 - RNA, 23 nt, Artificial Sequence
  source: /note="Description of Artificial Sequence: Synthetic oligonucleotide"
acuguagaaaggcaugaagcauu

SEQ ID NO: 971 - RNA, 21 nt, Artificial Sequence
  source: /note="Description of Artificial Sequence: Synthetic oligonucleotide"
  modified_base (21)..(21): Inverted abasic nucleotide
ugcuucaugccuuucuacagn

SEQ ID NO: 972 - RNA, 23 nt, Artificial Sequence
  source: /note="Description of Artificial Sequence: Synthetic oligonucleotide"
acuguagaaaggcaugaagcauu

SEQ ID NO: 973 - RNA, 22 nt, Artificial Sequence
  source: /note="Description of Artificial Sequence: Synthetic oligonucleotide"
  modified_base (1)..(1): Inverted abasic nucleotide
ncuucaugccuuucuacaguuu

SEQ ID NO: 974 - RNA, 21 nt, Artificial Sequence
  source: /note="Description of Artificial Sequence: Synthetic oligonucleotide"
acuguagaaaggcaugaaguu

SEQ ID NO: 975 - RNA, 21 nt, Artificial Sequence
  source: /note="Description of Artificial Sequence: Synthetic oligonucleotide"
  modified_base (21)..(21): Inverted abasic nucleotide
ugcuucaugccuuucuacagn

SEQ ID NO: 976 - RNA, 23 nt, Artificial Sequence
  source: /note="Description of Artificial Sequence: Synthetic oligonucleotide"
acuguagaaaggcaugaagcauu

SEQ ID NO: 977 - RNA, 21 nt, Artificial Sequence
  source: /note="Description of Artificial Sequence: Synthetic oligonucleotide"
  modified_base (21)..(21): Inverted abasic nucleotide
augccuuucuacaguggcuun

SEQ ID NO: 978 - RNA, 23 nt, Artificial Sequence
  source: /note="Description of Artificial Sequence: Synthetic oligonucleotide"
agccacuguagaaaggcaugauu

SEQ ID NO: 979 - RNA, 21 nt, Artificial Sequence
  source: /note="Description of Artificial Sequence: Synthetic oligonucleotide"
  modified_base (21)..(21): Inverted abasic nucleotide
ucaugccuuucuacaguggcn

SEQ ID NO: 980 - RNA, 23 nt, Artificial Sequence
  source: /note="Description of Artificial Sequence: Synthetic oligonucleotide"
agccacuguagaaaggcaugauu

SEQ ID NO: 981 - RNA, 22 nt, Artificial Sequence
  source: /note="Description of Artificial Sequence: Synthetic oligonucleotide"
  modified_base (1)..(1): Inverted abasic nucleotide
naugccuuucuacaguggcuuu

SEQ ID NO: 982 - RNA, 21 nt, Artificial Sequence
  source: /note="Description of Artificial Sequence: Synthetic oligonucleotide"
agccacuguagaaaggcauuu

SEQ ID NO: 983 - RNA, 22 nt, Artificial Sequence
  source: /note="Description of Artificial Sequence: Synthetic oligonucleotide"
  modified_base (1)..(1): Inverted abasic nucleotide
naugccuuucuacaguggcuuu

SEQ ID NO: 984 - RNA, 21 nt, Artificial Sequence
  source: /note="Description of Artificial Sequence: Synthetic oligonucleotide"
agccacuguagaaaggcauuu

SEQ ID NO: 985 - RNA, 22 nt, Artificial Sequence
  source: /note="Description of Artificial Sequence: Synthetic oligonucleotide"
  modified_base (1)..(1): Inverted abasic nucleotide
nucaugccuuucuacaguggcu

SEQ ID NO: 986 - RNA, 23 nt, Artificial Sequence
  source: /note="Description of Artificial Sequence: Synthetic oligonucleotide"
agccacuguagaaaggcaugauu

SEQ ID NO: 987 - RNA, 21 nt, Artificial Sequence
  source: /note="Description of Artificial Sequence: Synthetic oligonucleotide"
  modified_base (21)..(21): Inverted abasic nucleotide
ucaugccuuucuacaguggcn

SEQ ID NO: 988 - RNA, 23 nt, Artificial Sequence
  source: /note="Description of Artificial Sequence: Synthetic oligonucleotide"
agccacuguagaaaggcaugauu

SEQ ID NO: 989 - RNA, 22 nt, Artificial Sequence
  source: /note="Description of Artificial Sequence: Synthetic oligonucleotide"
  modified_base (1)..(1): Inverted abasic nucleotide
naugccuuucuacaguggcuuu

SEQ ID NO: 990 - RNA, 21 nt, Artificial Sequence
  source: /note="Description of Artificial Sequence: Synthetic oligonucleotide"
agccacuguagaaaggcauuu

SEQ ID NO: 991 - RNA, 21 nt, Artificial Sequence
  source: /note="Description of Artificial Sequence: Synthetic oligonucleotide"
  modified_base (21)..(21): Inverted abasic nucleotide
ucaugccuuucuacaguggcn

SEQ ID NO: 992 - RNA, 23 nt, Artificial Sequence
  source: /note="Description of Artificial Sequence: Synthetic oligonucleotide"
agccacuguagaaaggcaugauu

SEQ ID NO: 993 - RNA, 21 nt, Artificial Sequence
  source: /note="Description of Artificial Sequence: Synthetic oligonucleotide"
  modified_base (21)..(21): Inverted abasic nucleotide
ucaugccuuucuacaguggcn

SEQ ID NO: 994 - RNA, 23 nt, Artificial Sequence
  source: /note="Description of Artificial Sequence: Synthetic oligonucleotide"
agccacuguagaaaggcaugauu

SEQ ID NO: 995 - RNA, 22 nt, Artificial Sequence
  source: /note="Description of Artificial Sequence: Synthetic oligonucleotide"
  modified_base (1)..(1): Inverted abasic nucleotide
  modified_base (22)..(22): Inverted abasic nucleotide
nucaugccuuucuacaguggcn

SEQ ID NO: 996 - RNA, 23 nt, Artificial Sequence
  source: /note="Description of Artificial Sequence: Synthetic oligonucleotide"
agccacuguagaaaggcaugauu

SEQ ID NO: 997 - RNA, 22 nt, Artificial Sequence
  source: /note="Description of Artificial Sequence: Synthetic oligonucleotide"
  modified_base (1)..(1): Inverted abasic nucleotide
naugccuuucuacaguggcauu

SEQ ID NO: 998 - RNA, 21 nt, Artificial Sequence
  source: /note="Description of Artificial Sequence: Synthetic oligonucleotide"
ugccacuguagaaaggcauuu

SEQ ID NO: 999 - RNA, 21 nt, Artificial Sequence
  source: /note="Description of Artificial Sequence: Synthetic oligonucleotide"
  modified_base (21)..(21): Inverted abasic nucleotide
ucaugccuuucuacaguggcn

SEQ ID NO: 1000 - RNA, 23 nt, Artificial Sequence
  source: /note="Description of Artificial Sequence: Synthetic oligonucleotide"
ugccacuguagaaaggcaugauu

SEQ ID NO: 1001 - RNA, 22 nt, Artificial Sequence
  source: /note="Description of Artificial Sequence: Synthetic oligonucleotide"
  modified_base (1)..(1): Inverted abasic nucleotide
nucaugccuuucuacaguggca

SEQ ID NO: 1002 - RNA, 23 nt, Artificial Sequence
  source: /note="Description of Artificial Sequence: Synthetic oligonucleotide"
ugccacuguagaaaggcaugauu

SEQ ID NO: 1003 - DNA, 21 bp, Artificial Sequence
  source: /note="Description of Artificial Sequence: Synthetic oligonucleotide"
  source: /note="Description of Combined DNA/RNA Molecule: Synthetic oligonucleotide"
ucaugccuuucuacaguggca

SEQ ID NO: 1004 - RNA, 23 nt, Artificial Sequence
  source: /note="Description of Artificial Sequence: Synthetic oligonucleotide"
ugccacuguagaaaggcaugauu

SEQ ID NO: 1005 - RNA, 21 nt, Artificial Sequence
  source: /note="Description of Artificial Sequence: Synthetic oligonucleotide"
  modified_base (21)..(21): Inverted abasic nucleotide
cugcuucaugccuuucuacan

SEQ ID NO: 1006 - RNA, 23 nt, Artificial Sequence
  source: /note="Description of Artificial Sequence: Synthetic oligonucleotide"
auguagaaaggcaugaagcaguu

SEQ ID NO: 1007 - RNA, 21 nt, Artificial Sequence
  source: /note="Description of Artificial Sequence: Synthetic oligonucleotide"
  modified_base (21)..(21): Inverted abasic nucleotide
cugcuucaugccuuucuacan

SEQ ID NO: 1008 - RNA, 23 nt, Artificial Sequence
  source: /note="Description of Artificial Sequence: Synthetic oligonucleotide"
uuguagaaaggcaugaagcaguu

SEQ ID NO: 1009 - DNA, 21 bp, Artificial Sequence
  source: /note="Description of Artificial Sequence: Synthetic oligonucleotide"
  source: /note="Description of Combined DNA/RNA Molecule: Synthetic oligonucleotide"
cugcuucaugccuuucuacaa

SEQ ID NO: 1010 - RNA, 23 nt, Artificial Sequence
  source: /note="Description of Artificial Sequence: Synthetic oligonucleotide"
uuguagaaaggcaugaagcaguu

SEQ ID NO: 1011 - RNA, 21 nt, Artificial Sequence
  source: /note="Description of Artificial Sequence: Synthetic oligonucleotide"
  modified_base (21)..(21): Inverted abasic nucleotide
ucaugccuuucuacaguggcn

SEQ ID NO: 1012 - RNA, 23 nt, Artificial Sequence
  source: /note="Description of Artificial Sequence: Synthetic oligonucleotide"
ugccacuguagaaaggcaugauu

SEQ ID NO: 1013 - DNA, 21 bp, Artificial Sequence
  source: /note="Description of Artificial Sequence: Synthetic oligonucleotide"
  source: /note="Description of Combined DNA/RNA Molecule: Synthetic oligonucleotide"
ucaugccuuucuacaguggca

SEQ ID NO: 1014 - RNA, 23 nt, Artificial Sequence
  source: /note="Description of Artificial Sequence: Synthetic oligonucleotide"
ugccacuguagaaaggcaugauu

SEQ ID NO: 1015 - RNA, 22 nt, Artificial Sequence
  source: /note="Description of Artificial Sequence: Synthetic oligonucleotide"
  modified_base (1)..(1): Inverted abasic nucleotide
ncuucaugccuuucuacaguuu

SEQ ID NO: 1016 - RNA, 21 nt, Artificial Sequence
  source: /note="Description of Artificial Sequence: Synthetic oligonucleotide"
acuguagaaaggcaugaaguu

SEQ ID NO: 1017 - RNA, 21 nt, Artificial Sequence
  source: /note="Description of Artificial Sequence: Synthetic oligonucleotide"
  modified_base (21)..(21): Inverted abasic nucleotide
cugcuucaugccuuucuacan

SEQ ID NO: 1018 - RNA, 23 nt, Artificial Sequence
  source: /note="Description of Artificial Sequence: Synthetic oligonucleotide"
  modified_base (6)..(6): Abasic nucleotide
auguanaaaggcaugaagcaguu

SEQ ID NO: 1019 - RNA, 21 nt, Artificial Sequence
  source: /note="Description of Artificial Sequence: Synthetic oligonucleotide"
  modified_base (21)..(21): Inverted abasic nucleotide
cugcuucaugccuuucuacan

SEQ ID NO: 1020 - RNA, 23 nt, Artificial Sequence
  source: /note="Description of Artificial Sequence: Synthetic oligonucleotide"
  modified_base (6)..(6): Abasic nucleotide
auguanaaaggcaugaagcaguu

SEQ ID NO: 1021 - RNA, 21 nt, Artificial Sequence
  source: /note="Description of Artificial Sequence: Synthetic oligonucleotide"
  modified_base (21)..(21): Inverted abasic nucleotide
ugcuucaugccuuucuacagn

SEQ ID NO: 1022 - RNA, 23 nt, Artificial Sequence
  source: /note="Description of Artificial Sequence: Synthetic oligonucleotide"
  modified_base (6)..(6): Abasic nucleotide
acugungaaaggcaugaagcauu

SEQ ID NO: 1023 - RNA, 21 nt, Artificial Sequence
  source: /note="Description of Artificial Sequence: Synthetic oligonucleotide"
  modified_base (21)..(21): Inverted abasic nucleotide
ugcuucaugccuuucuacagn

SEQ ID NO: 1024 - RNA, 23 nt, Artificial Sequence
  source: /note="Description of Artificial Sequence: Synthetic oligonucleotide"
  modified_base (6)..(6): Abasic nucleotide
acugungaaaggcaugaagcauu

SEQ ID NO: 1025 - RNA, 21 nt, Artificial Sequence
  source: /note="Description of Artificial Sequence: Synthetic oligonucleotide"
  modified_base (21)..(21): Inverted abasic nucleotide
ucaugccuuucuacaguggcn

SEQ ID NO: 1026 - RNA, 23 nt, Artificial Sequence
  source: /note="Description of Artificial Sequence: Synthetic oligonucleotide"
  modified_base (6)..(6): Abasic nucleotide
agccanuguagaaaggcaugauu

SEQ ID NO: 1027 - RNA, 21 nt, Artificial Sequence
  source: /note="Description of Artificial Sequence: Synthetic oligonucleotide"
  modified_base (21)..(21): Inverted abasic nucleotide
ucaugccuuucuacaguggcn

SEQ ID NO: 1028 - RNA, 23 nt, Artificial Sequence
  source: /note="Description of Artificial Sequence: Synthetic oligonucleotide"
  modified_base (6)..(6): Abasic nucleotide
agccanuguagaaaggcaugauu

SEQ ID NO: 1029 - RNA, 21 nt, Artificial Sequence
  source: /note="Description of Artificial Sequence: Synthetic oligonucleotide"
  modified_base (21)..(21): Inverted abasic nucleotide
cugcuucaugccuuucuacan

SEQ ID NO: 1030 - RNA, 23 nt, Artificial Sequence
  source: /note="Description of Artificial Sequence: Synthetic oligonucleotide"
auguagaaaggcaugaagcaguu

SEQ ID NO: 1031 - RNA, 21 nt, Artificial Sequence
  source: /note="Description of Artificial Sequence: Synthetic oligonucleotide"
  modified_base (21)..(21): Inverted abasic nucleotide
cugcuucaugccuuucuacan

SEQ ID NO: 1032 - RNA, 23 nt, Artificial Sequence
  source: /note="Description of Artificial Sequence: Synthetic oligonucleotide"
auguagaaaggcaugaagcaguu

SEQ ID NO: 1033 - RNA, 21 nt, Artificial Sequence
  source: /note="Description of Artificial Sequence: Synthetic oligonucleotide"
  modified_base (21)..(21): Inverted abasic nucleotide
cugcuucaugccuuucuacan

SEQ ID NO: 1034 - RNA, 23 nt, Artificial Sequence
  source: /note="Description of Artificial Sequence: Synthetic oligonucleotide"
auguagaaaggcaugaagcaguu

SEQ ID NO: 1035 - RNA, 21 nt, Artificial Sequence
  source: /note="Description of Artificial Sequence: Synthetic oligonucleotide"
  modified_base (21)..(21): Inverted abasic nucleotide
cugcuucaugccuuucuacan

SEQ ID NO: 1036 - RNA, 23 nt, Artificial Sequence
  source: /note="Description of Artificial Sequence: Synthetic oligonucleotide"
auguagaaaggcaugaagcaguu

SEQ ID NO: 1037 - RNA, 21 nt, Artificial Sequence
  source: /note="Description of Artificial Sequence: Synthetic oligonucleotide"
  modified_base (21)..(21): Inverted abasic nucleotide
cugcuucaugccuuucuacan

SEQ ID NO: 1038 - RNA, 23 nt, Artificial Sequence
  source: /note="Description of Artificial Sequence: Synthetic oligonucleotide"
auguagaaaggcaugaagcaguu

SEQ ID NO: 1039 - RNA, 21 nt, Artificial Sequence
  source: /note="Description of Artificial Sequence: Synthetic oligonucleotide"
  modified_base (21)..(21): Inverted abasic nucleotide
cugcuucaugccuuucuacan

SEQ ID NO: 1040 - RNA, 23 nt, Artificial Sequence
  source: /note="Description of Artificial Sequence: Synthetic oligonucleotide"
auguagaaaggcaugaagcaguu

SEQ ID NO: 1041 - RNA, 21 nt, Artificial Sequence
  source: /note="Description of Artificial Sequence: Synthetic oligonucleotide"
  modified_base (21)..(21): Inverted abasic nucleotide
cugcuucaugccuuucuacan

SEQ ID NO: 1042 - RNA, 23 nt, Artificial Sequence
  source: /note="Description of Artificial Sequence: Synthetic oligonucleotide"
auguagaaaggcaugaagcaguu

SEQ ID NO: 1043 - RNA, 22 nt, Artificial Sequence
  source: /note="Description of Artificial Sequence: Synthetic oligonucleotide"
  modified_base (1)..(1): Inverted abasic nucleotide
ncugcuucaugccuuucuacau

SEQ ID NO: 1044 - RNA, 23 nt, Artificial Sequence
  source: /note="Description of Artificial Sequence: Synthetic oligonucleotide"
auguagaaaggcaugaagcaguu

SEQ ID NO: 1045 - RNA, 22 nt, Artificial Sequence
  source: /note="Description of Artificial Sequence: Synthetic oligonucleotide"
  modified_base (1)..(1): Inverted abasic nucleotide
  modified_base (22)..(22): Inverted abasic nucleotide
ncugcuucaugccuuucuacan

SEQ ID NO: 1046 - RNA, 23 nt, Artificial Sequence
  source: /note="Description of Artificial Sequence: Synthetic oligonucleotide"
auguagaaaggcaugaagcaguu

SEQ ID NO: 1047 - RNA, 21 nt, Artificial Sequence
  source: /note="Description of Artificial Sequence: Synthetic oligonucleotide"
  modified_base (21)..(21): Inverted abasic nucleotide
cugcuucaugccuuucuacan

SEQ ID NO: 1048 - RNA, 23 nt, Artificial Sequence
  source: /note="Description of Artificial Sequence: Synthetic oligonucleotide"
auguagaaaggcaugaagcaguu

SEQ ID NO: 1049 - RNA, 21 nt, Artificial Sequence
  source: /note="Description of Artificial Sequence: Synthetic oligonucleotide"
  modified_base (21)..(21): Inverted abasic nucleotide
cugcuucaugccuuucuacan

SEQ ID NO: 1050 - RNA, 23 nt, Artificial Sequence
  source: /note="Description of Artificial Sequence: Synthetic oligonucleotide"
auguagaaaggcaugaagcaguu

SEQ ID NO: 1051 - RNA, 22 nt, Artificial Sequence
  source: /note="Description of Artificial Sequence: Synthetic oligonucleotide"
  modified_base (1)..(1): Inverted abasic nucleotide
ncugcuucaugccuuucuacau

SEQ ID NO: 1052 - RNA, 23 nt, Artificial Sequence
  source: /note="Description of Artificial Sequence: Synthetic oligonucleotide"
auguagaaaggcaugaagcaguu

SEQ ID NO: 1053 - RNA, 21 nt, Artificial Sequence
  source: /note="Description of Artificial Sequence: Synthetic oligonucleotide"
  modified_base (21)..(21): Inverted abasic nucleotide
cugcuucaugccuuucuacan

SEQ ID NO: 1054 - RNA, 23 nt, Artificial Sequence
  source: /note="Description of Artificial Sequence: Synthetic oligonucleotide"
auguagaaaggcaugaagcaguu

SEQ ID NO: 1055 - RNA, 21 nt, Artificial Sequence
  source: /note="Description of Artificial Sequence: Synthetic oligonucleotide"
  modified_base (21)..(21): Inverted abasic nucleotide
cugcuucaugccuuucuacan

SEQ ID NO: 1056 - RNA, 23 nt, Artificial Sequence
  source: /note="Description of Artificial Sequence: Synthetic oligonucleotide"
auguagaaaggcaugaagcaguu

SEQ ID NO: 1057 - RNA, 22 nt, Artificial Sequence
  source: /note="Description of Artificial Sequence: Synthetic oligonucleotide"
  modified_base (1)..(1): Inverted abasic nucleotide
ncugcuucaugccuuucuacau

SEQ ID NO: 1058 - RNA, 23 nt, Artificial Sequence
  source: /note="Description of Artificial Sequence: Synthetic oligonucleotide"
auguagaaaggcaugaagcaguu

SEQ ID NO: 1059 - RNA, 22 nt, Artificial Sequence
  source: /note="Description of Artificial Sequence: Synthetic oligonucleotide"
  modified_base (1)..(1): Inverted abasic nucleotide
  modified_base (22)..(22): Inverted abasic nucleotide
ncugcuucaugccuuucuacan

SEQ ID NO: 1060 - RNA, 23 nt, Artificial Sequence
  source: /note="Description of Artificial Sequence: Synthetic oligonucleotide"
auguagaaaggcaugaagcaguu

SEQ ID NO: 1061 - RNA, 21 nt, Artificial Sequence
  source: /note="Description of Artificial Sequence: Synthetic oligonucleotide"
  modified_base (21)..(21): Inverted abasic nucleotide
cugcuucaugccuuucuacan

SEQ ID NO: 1062 - RNA, 23 nt, Artificial Sequence
  source: /note="Description of Artificial Sequence: Synthetic oligonucleotide"
  modified_base (2)..(2): Abasic nucleotide
anguagaaaggcaugaagcaguu

SEQ ID NO: 1063 - RNA, 21 nt, Artificial Sequence
  source: /note="Description of Artificial Sequence: Synthetic oligonucleotide"
  modified_base (21)..(21): Inverted abasic nucleotide
cugcuucaugccuuucuacan

SEQ ID NO: 1064 - RNA, 23 nt, Artificial Sequence
  source: /note="Description of Artificial Sequence: Synthetic oligonucleotide"
  modified_base (3)..(3): Abasic nucleotide
aunuagaaaggcaugaagcaguu

SEQ ID NO: 1065 - RNA, 21 nt, Artificial Sequence
  source: /note="Description of Artificial Sequence: Synthetic oligonucleotide"
  modified_base (21)..(21): Inverted abasic nucleotide
cugcuucaugccuuucuacan

SEQ ID NO: 1066 - RNA, 23 nt, Artificial Sequence
  source: /note="Description of Artificial Sequence: Synthetic oligonucleotide"
  modified_base (4)..(4): Abasic nucleotide
augnagaaaggcaugaagcaguu

SEQ ID NO: 1067 - RNA, 21 nt, Artificial Sequence
  source: /note="Description of Artificial Sequence: Synthetic oligonucleotide"
  modified_base (21)..(21): Inverted abasic nucleotide
cugcuucaugccuuucuacan

SEQ ID NO: 1068 - RNA, 23 nt, Artificial Sequence
  source: /note="Description of Artificial Sequence: Synthetic oligonucleotide"
  modified_base (5)..(5): Abasic nucleotide
augungaaaggcaugaagcaguu

SEQ ID NO: 1069 - RNA, 21 nt, Artificial Sequence
  source: /note="Description of Artificial Sequence: Synthetic oligonucleotide"
  modified_base (21)..(21): Inverted abasic nucleotide
cugcuucaugccuuucuacan

SEQ ID NO: 1070 - RNA, 23 nt, Artificial Sequence
  source: /note="Description of Artificial Sequence: Synthetic oligonucleotide"
  modified_base (7)..(7): Abasic nucleotide
auguagnaaggcaugaagcaguu

SEQ ID NO: 1071 - RNA, 21 nt, Artificial Sequence
  source: /note="Description of Artificial Sequence: Synthetic oligonucleotide"
  modified_base (21)..(21): Inverted abasic nucleotide
cugcuucaugccuuucuacan

SEQ ID NO: 1072 - RNA, 23 nt, Artificial Sequence
  source: /note="Description of Artificial Sequence: Synthetic oligonucleotide"
  modified_base (8)..(8): Abasic nucleotide
auguaganaggcaugaagcaguu

SEQ ID NO: 1073 - RNA, 21 nt, Artificial Sequence
  source: /note="Description of Artificial Sequence: Synthetic oligonucleotide"
  modified_base (21)..(21): Inverted abasic nucleotide
caacguacccuucauugaugn

SEQ ID NO: 1074 - RNA, 23 nt, Artificial Sequence
  source: /note="Description of Artificial Sequence: Synthetic oligonucleotide"
acaucaaugaaggguacguuguu

SEQ ID NO: 1075 - RNA, 21 nt, Artificial Sequence
  source: /note="Description of Artificial Sequence: Synthetic oligonucleotide"
  modified_base (21)..(21): Inverted abasic nucleotide
caacguacccuucauugaugn

SEQ ID NO: 1076 - RNA, 23 nt, Artificial Sequence
  source: /note="Description of Artificial Sequence: Synthetic oligonucleotide"
acaucaaugaaggguacguuguu

SEQ ID NO: 1077 - RNA, 21 nt, Artificial Sequence
  source: /note="Description of Artificial Sequence: Synthetic oligonucleotide"
  modified_base (21)..(21): Inverted abasic nucleotide
acauggcuuccagauaugccn

SEQ ID NO: 1078 - RNA, 23 nt, Artificial Sequence
  source: /note="Description of Artificial Sequence: Synthetic oligonucleotide"
aggcauaucuggaagccauguuu

SEQ ID NO: 1079 - RNA, 21 nt, Artificial Sequence
  source: /note="Description of Artificial Sequence: Synthetic oligonucleotide"
  modified_base (21)..(21): Inverted abasic nucleotide
acauggcuuccagauaugccn

SEQ ID NO: 1080 - RNA, 23 nt, Artificial Sequence
  source: /note="Description of Artificial Sequence: Synthetic oligonucleotide"
aggcauaucuggaagccauguuu

SEQ ID NO: 1081 - RNA, 21 nt, Artificial Sequence
  source: /note="Description of Artificial Sequence: Synthetic oligonucleotide"
  modified_base (21)..(21): Inverted abasic nucleotide
cugcuucaugccuuucuacan

SEQ ID NO: 1082 - RNA, 23 nt, Artificial Sequence
  source: /note="Description of Artificial Sequence: Synthetic oligonucleotide"
auguagaaaggcaugaagcaguu

SEQ ID NO: 1083 - RNA, 21 nt, Artificial Sequence
  source: /note="Description of Artificial Sequence: Synthetic oligonucleotide"
  modified_base (21)..(21): Inverted abasic nucleotide
cugcuucaugccuuucuacan

SEQ ID NO: 1084 - RNA, 23 nt, Artificial Sequence
  source: /note="Description of Artificial Sequence: Synthetic oligonucleotide"
auguagaaaggcaugaagcaguu

SEQ ID NO: 1085 - RNA, 21 nt, Artificial Sequence
  source: /note="Description of Artificial Sequence: Synthetic oligonucleotide"
  modified_base (21)..(21): Inverted abasic nucleotide
cugcuucaugccuuucuacan

SEQ ID NO: 1086 - RNA, 23 nt, Artificial Sequence
  source: /note="Description of Artificial Sequence: Synthetic oligonucleotide"
auguagaaaggcaugaagcaguu

SEQ ID NO: 1087 - RNA, 21 nt, Artificial Sequence
  source: /note="Description of Artificial Sequence: Synthetic oligonucleotide"
  modified_base (21)..(21): Inverted abasic nucleotide
cugcggcuuccugggcuucun

SEQ ID NO: 1088 - RNA, 23 nt, Artificial Sequence
  source: /note="Description of Artificial Sequence: Synthetic oligonucleotide"
uagaagcccaggaagccgcaguu

SEQ ID NO: 1089 - RNA, 21 nt, Artificial Sequence
  source: /note="Description of Artificial Sequence: Synthetic oligonucleotide"
  modified_base (21)..(21): Inverted abasic nucleotide
cugcggcuuccugggcuucun

SEQ ID NO: 1090 - RNA, 23 nt, Artificial Sequence
  source: /note="Description of Artificial Sequence: Synthetic oligonucleotide"
uagaagcccaggaagccgcaguu

SEQ ID NO: 1091 - RNA, 21 nt, Artificial Sequence
  source: /note="Description of Artificial Sequence: Synthetic oligonucleotide"
  modified_base (21)..(21): Inverted abasic nucleotide
ugcuucaugccuuucuacagn

SEQ ID NO: 1092 - RNA, 23 nt, Artificial Sequence
  source: /note="Description of Artificial Sequence: Synthetic oligonucleotide"
acuguagaaaggcaugaagcauu

SEQ ID NO: 1093 - RNA, 22 nt, Artificial Sequence
  source: /note="Description of Artificial Sequence: Synthetic oligonucleotide"
  modified_base (1)..(1): Inverted abasic nucleotide
nugcuucaugccuuucuacagu

SEQ ID NO: 1094 - RNA, 23 nt, Artificial Sequence
  source: /note="Description of Artificial Sequence: Synthetic oligonucleotide"
acuguagaaaggcaugaagcauu

SEQ ID NO: 1095 - RNA, 22 nt, Artificial Sequence
  source: /note="Description of Artificial Sequence: Synthetic oligonucleotide"
  modified_base (1)..(1): Inverted abasic nucleotide
  modified_base (22)..(22): Inverted abasic nucleotide
nugcuucaugccuuucuacagn

SEQ ID NO: 1096 - RNA, 23 nt, Artificial Sequence
  source: /note="Description of Artificial Sequence: Synthetic oligonucleotide"
acuguagaaaggcaugaagcauu

SEQ ID NO: 1097 - RNA, 21 nt, Artificial Sequence
  source: /note="Description of Artificial Sequence: Synthetic oligonucleotide"
  modified_base (21)..(21): Inverted abasic nucleotide
ugcuucaugccuuucuacagn

SEQ ID NO: 1098 - RNA, 23 nt, Artificial Sequence
  source: /note="Description of Artificial Sequence: Synthetic oligonucleotide"
acuguagaaaggcaugaagcauu

SEQ ID NO: 1099 - RNA, 21 nt, Artificial Sequence
  source: /note="Description of Artificial Sequence: Synthetic oligonucleotide"
  modified_base (21)..(21): Inverted abasic nucleotide
ugcuucaugccuuucuacagn

SEQ ID NO: 1100 - RNA, 23 nt, Artificial Sequence
  source: /note="Description of Artificial Sequence: Synthetic oligonucleotide"
acuguagaaaggcaugaagcauu

SEQ ID NO: 1101 - RNA, 21 nt, Artificial Sequence
  source: /note="Description of Artificial Sequence: Synthetic oligonucleotide"
  modified_base (21)..(21): Inverted abasic nucleotide
ugcuucaugccuuucuacagn

SEQ ID NO: 1102 - RNA, 23 nt, Artificial Sequence
  source: /note="Description of Artificial Sequence: Synthetic oligonucleotide"
acuguagaaaggcaugaagcauu

SEQ ID NO: 1103 - RNA, 21 nt, Artificial Sequence
  source: /note="Description of Artificial Sequence: Synthetic oligonucleotide"
cugcuucaugccuuucuacau

SEQ ID NO: 1104 - RNA, 23 nt, Artificial Sequence
  source: /note="Description of Artificial Sequence: Synthetic oligonucleotide"
auguagaaaggcaugaagcaguu

SEQ ID NO: 1105 - RNA, 21 nt, Artificial Sequence
  source: /note="Description of Artificial Sequence: Synthetic oligonucleotide"
cugcuucaugccuuucuacau

SEQ ID NO: 1106 - RNA, 23 nt, Artificial Sequence
  source: /note="Description of Artificial Sequence: Synthetic oligonucleotide"
auguagaaaggcaugaagcaguu

SEQ ID NO: 1107 - RNA, 21 nt, Artificial Sequence
  source: /note="Description of Artificial Sequence: Synthetic oligonucleotide"
cugcuucaugccuuucuacau

SEQ ID NO: 1108 - RNA, 23 nt, Artificial Sequence
  source: /note="Description of Artificial Sequence: Synthetic oligonucleotide"
auguagaaaggcaugaagcaguu

SEQ ID NO: 1109 - RNA, 21 nt, Artificial Sequence
  source: /note="Description of Artificial Sequence: Synthetic oligonucleotide"
  modified_base (21)..(21): Inverted abasic nucleotide
ugcuucaugccuuucuacagn

SEQ ID NO: 1110 - RNA, 23 nt, Artificial Sequence
  source: /note="Description of Artificial Sequence: Synthetic oligonucleotide"
ucuguagaaaggcaugaagcauu

SEQ ID NO: 1111 - DNA, 21 bp, Artificial Sequence
  source: /note="Description of Artificial Sequence: Synthetic oligonucleotide"
  source: /note="Description of Combined DNA/RNA Molecule: Synthetic oligonucleotide"
ugcuucaugccuuucuacaga

SEQ ID NO: 1112 - RNA, 23 nt, Artificial Sequence
  source: /note="Description of Artificial Sequence: Synthetic oligonucleotide"
ucuguagaaaggcaugaagcauu

SEQ ID NO: 1113 - DNA, 21 bp, Artificial Sequence
  source: /note="Description of Artificial Sequence: Synthetic oligonucleotide"
  source: /note="Description of Combined DNA/RNA Molecule: Synthetic oligonucleotide"
cugcuucaugccuuucuacat

SEQ ID NO: 1114 - RNA, 23 nt, Artificial Sequence
  source: /note="Description of Artificial Sequence: Synthetic oligonucleotide"
auguagaaaggcaugaagcaguu

SEQ ID NO: 1115 - RNA, 21 nt, Artificial Sequence
  source: /note="Description of Artificial Sequence: Synthetic oligonucleotide"
  modified_base (21)..(21): Inverted abasic nucleotide
cugcuucaugccuuucuacan

SEQ ID NO: 1116 - RNA, 23 nt, Artificial Sequence
  source: /note="Description of Artificial Sequence: Synthetic oligonucleotide"
auguagaaaggcaugaagcaguu

SEQ ID NO: 1117 - RNA, 21 nt, Artificial Sequence
  source: /note="Description of Artificial Sequence: Synthetic oligonucleotide"
  modified_base (21)..(21): Inverted abasic nucleotide
cugcuucaugccuuucuacan

SEQ ID NO: 1118 - RNA, 23 nt, Artificial Sequence
  source: /note="Description of Artificial Sequence: Synthetic oligonucleotide"
auguagaaaggcaugaagcaguu

SEQ ID NO: 1119 - RNA, 21 nt, Artificial Sequence
  source: /note="Description of Artificial Sequence: Synthetic oligonucleotide"
  modified_base (21)..(21): Inverted abasic nucleotide
cugcuucaugccuuucuacan

SEQ ID NO: 1120 - RNA, 23 nt, Artificial Sequence
  source: /note="Description of Artificial Sequence: Synthetic oligonucleotide"
auguagaaaggcaugaagcaguu

SEQ ID NO: 1121 - RNA, 21 nt, Artificial Sequence
  source: /note="Description of Artificial Sequence: Synthetic oligonucleotide"
  modified_base (21)..(21): Inverted abasic nucleotide
cugcuucaugccuuucuacan

SEQ ID NO: 1122 - RNA, 23 nt, Artificial Sequence
  source: /note="Description of Artificial Sequence: Synthetic oligonucleotide"
auguagaaaggcaugaagcaguu

SEQ ID NO: 1123 - RNA, 21 nt, Artificial Sequence
  source: /note="Description of Artificial Sequence: Synthetic oligonucleotide"
  modified_base (21)..(21): Inverted abasic nucleotide
cugcuucaugccuuucuacan

SEQ ID NO: 1124 - RNA, 23 nt, Artificial Sequence
  source: /note="Description of Artificial Sequence: Synthetic oligonucleotide"
auguagaaaggcaugaagcaguu

SEQ ID NO: 1125 - RNA, 21 nt, Artificial Sequence
  source: /note="Description of Artificial Sequence: Synthetic oligonucleotide"
  modified_base (21)..(21): Inverted abasic nucleotide
cugcuucaugccuuucuacan

SEQ ID NO: 1126 - RNA, 23 nt, Artificial Sequence
  source: /note="Description of Artificial Sequence: Synthetic oligonucleotide"
auguagaaaggcaugaagcaguu

SEQ ID NO: 1127 - RNA, 21 nt, Artificial Sequence
  source: /note="Description of Artificial Sequence: Synthetic oligonucleotide"
  modified_base (21)..(21): Inverted abasic nucleotide
cugcuucaugccuuucuacan

SEQ ID NO: 1128 - RNA, 23 nt, Artificial Sequence
  source: /note="Description of Artificial Sequence: Synthetic oligonucleotide"
auguagaaaggcaugaagcaguu

SEQ ID NO: 1129 - RNA, 21 nt, Artificial Sequence
  source: /note="Description of Artificial Sequence: Synthetic oligonucleotide"
  modified_base (21)..(21): Inverted abasic nucleotide
cugcuucaugccuuucuacan

SEQ ID NO: 1130 - RNA, 23 nt, Artificial Sequence
  source: /note="Description of Artificial Sequence: Synthetic oligonucleotide"
auguagaaaggcaugaagcaguu

SEQ ID NO: 1131 - RNA, 21 nt, Artificial Sequence
  source: /note="Description of Artificial Sequence: Synthetic oligonucleotide"
  modified_base (21)..(21): Inverted abasic nucleotide
cugcuucaugccuuucuacan

SEQ ID NO: 1132 - RNA, 23 nt, Artificial Sequence
  source: /note="Description of Artificial Sequence: Synthetic oligonucleotide"
auguagaaaggcaugaagcaguu

SEQ ID NO: 1133 - RNA, 21 nt, Artificial Sequence
  source: /note="Description of Artificial Sequence: Synthetic oligonucleotide"
  modified_base (21)..(21): Inverted abasic nucleotide
cugcuucaugccuuucuacan

SEQ ID NO: 1134 - RNA, 23 nt, Artificial Sequence
  source: /note="Description of Artificial Sequence: Synthetic oligonucleotide"
auguagaaaggcaugaagcaguu

SEQ ID NO: 1135 - RNA, 21 nt, Artificial Sequence
  source: /note="Description of Artificial Sequence: Synthetic oligonucleotide"
  modified_base (21)..(21): Inverted abasic nucleotide
cugcuucaugccuuucuacan

SEQ ID NO: 1136 - RNA, 23 nt, Artificial Sequence
  source: /note="Description of Artificial Sequence: Synthetic oligonucleotide"
auguagaaaggcaugaagcaguu

SEQ ID NO: 1137 - RNA, 21 nt, Artificial Sequence
  source: /note="Description of Artificial Sequence: Synthetic oligonucleotide"
  modified_base (21)..(21): Inverted abasic nucleotide
cugcuucaugccuuucuacan

SEQ ID NO: 1138 - RNA, 23 nt, Artificial Sequence
  source: /note="Description of Artificial Sequence: Synthetic oligonucleotide"
auguagaaaggcaugaagcaguu

SEQ ID NO: 1139 - RNA, 21 nt, Artificial Sequence
  source: /note="Description of Artificial Sequence: Synthetic oligonucleotide"
  modified_base (21)..(21): Inverted abasic nucleotide
cugcuucaugccuuucuacan

SEQ ID NO: 1140 - RNA, 23 nt, Artificial Sequence
  source: /note="Description of Artificial Sequence: Synthetic oligonucleotide"
auguagaaaggcaugaagcaguu

SEQ ID NO: 1141 - RNA, 21 nt, Artificial Sequence
  source: /note="Description of Artificial Sequence: Synthetic oligonucleotide"
  modified_base (21)..(21): Inverted abasic nucleotide
cugcuucaugccuuucuacan

SEQ ID NO: 1142 - RNA, 23 nt, Artificial Sequence
  source: /note="Description of Artificial Sequence: Synthetic oligonucleotide"
auguagaaaggcaugaagcaguu

SEQ ID NO: 1143 - RNA, 21 nt, Artificial Sequence
  source: /note="Description of Artificial Sequence: Synthetic oligonucleotide"
  modified_base (21)..(21): Inverted abasic nucleotide
cugcuucaugccuuucuacan

SEQ ID NO: 1144 - RNA, 23 nt, Artificial Sequence
  source: /note="Description of Artificial Sequence: Synthetic oligonucleotide"
auguagaaaggcaugaagcaguu

SEQ ID NO: 1145 - RNA, 21 nt, Artificial Sequence
  source: /note="Description of Artificial Sequence: Synthetic oligonucleotide"
  modified_base (21)..(21): Inverted abasic nucleotide
cugcuucaugccuuucuacan

SEQ ID NO: 1146 - RNA, 23 nt, Artificial Sequence
  source: /note="Description of Artificial Sequence: Synthetic oligonucleotide"
auguagaaaggcaugaagcaguu

SEQ ID NO: 1147 - RNA, 21 nt, Artificial Sequence
  source: /note="Description of Artificial Sequence: Synthetic oligonucleotide"
  modified_base (21)..(21): Inverted abasic nucleotide
cugcuucaugccuuucuacan

SEQ ID NO: 1148 - RNA, 23 nt, Artificial Sequence
  source: /note="Description of Artificial Sequence: Synthetic oligonucleotide"
auguagaaaggcaugaagcaguu

SEQ ID NO: 1149 - RNA, 21 nt, Artificial Sequence
  source: /note="Description of Artificial Sequence: Synthetic oligonucleotide"
  modified_base (21)..(21): Inverted abasic nucleotide
cugcuucaugccuuucuacan

SEQ ID NO: 1150 - DNA, 23 bp, Artificial Sequence
  source: /note="Description of Artificial Sequence: Synthetic oligonucleotide"
  source: /note="Description of Combined DNA/RNA Molecule: Synthetic oligonucleotide"
auguagaaaggcaugaagcaguu

SEQ ID NO: 1151 - RNA, 21 nt, Artificial Sequence
  source: /note="Description of Artificial Sequence: Synthetic oligonucleotide"
  modified_base (21)..(21): Inverted abasic nucleotide
cugcuucaugccuuucuacan

SEQ ID NO: 1152 - DNA, 23 bp, Artificial Sequence
  source: /note="Description of Artificial Sequence: Synthetic oligonucleotide"
  source: /note="Description of Combined DNA/RNA Molecule: Synthetic oligonucleotide"
auguagaaaggcaugaagcaguu

SEQ ID NO: 1153 - RNA, 21 nt, Artificial Sequence
  source: /note="Description of Artificial Sequence: Synthetic oligonucleotide"
  modified_base (21)..(21): Inverted abasic nucleotide
cugcuucaugccuuucuacan

SEQ ID NO: 1154 - DNA, 23 bp, Artificial Sequence
  source: /note="Description of Artificial Sequence: Synthetic oligonucleotide"
  source: /note="Description of Combined DNA/RNA Molecule: Synthetic oligonucleotide"
auguagaaaggcaugaagcaguu

SEQ ID NO: 1155 - RNA, 21 nt, Artificial Sequence
  source: /note="Description of Artificial Sequence: Synthetic oligonucleotide"
  modified_base (21)..(21): Inverted abasic nucleotide
cugcuucaugccuuucuacan

SEQ ID NO: 1156 - RNA, 23 nt, Artificial Sequence
  source: /note="Description of Artificial Sequence: Synthetic oligonucleotide"
auguagaaaggcaugaagcaguu

SEQ ID NO: 1157 - RNA, 21 nt, Artificial Sequence
  source: /note="Description of Artificial Sequence: Synthetic oligonucleotide"
  modified_base (21)..(21): Inverted abasic nucleotide
cugcuucaugccuuucuacan

SEQ ID NO: 1158 - RNA, 23 nt, Artificial Sequence
  source: /note="Description of Artificial Sequence: Synthetic oligonucleotide"
auguagaaaggcaugaagcaguu

SEQ ID NO: 1159 - RNA, 21 nt, Artificial Sequence
  source: /note="Description of Artificial Sequence: Synthetic oligonucleotide"
  modified_base (21)..(21): Inverted abasic nucleotide
cugcuucaugccuuucuacan

SEQ ID NO: 1160 - RNA, 23 nt, Artificial Sequence
  source: /note="Description of Artificial Sequence: Synthetic oligonucleotide"
auguagaaaggcaugaagcaguu

SEQ ID NO: 1161 - RNA, 21 nt, Artificial Sequence
  source: /note="Description of Artificial Sequence: Synthetic oligonucleotide"
  modified_base (21)..(21): Inverted abasic nucleotide
cugcuucaugccuuucuacan

SEQ ID NO: 1162 - RNA, 23 nt, Artificial Sequence
  source: /note="Description of Artificial Sequence: Synthetic oligonucleotide"
auguagaaaggcaugaagcaguu

SEQ ID NO: 1163 - RNA, 21 nt, Artificial Sequence
  source: /note="Description of Artificial Sequence: Synthetic oligonucleotide"
  modified_base (21)..(21): Inverted abasic nucleotide
cugcuucaugccuuucuacan

SEQ ID NO: 1164 - RNA, 23 nt, Artificial Sequence
  source: /note="Description of Artificial Sequence: Synthetic oligonucleotide"
auguagaaaggcaugaagcaguu

SEQ ID NO: 1165 - RNA, 21 nt, Artificial Sequence
  source: /note="Description of Artificial Sequence: Synthetic oligonucleotide"
  modified_base (21)..(21): Inverted abasic nucleotide
cugcuucaugccuuucuacan

SEQ ID NO: 1166 - RNA, 23 nt, Artificial Sequence
  source: /note="Description of Artificial Sequence: Synthetic oligonucleotide"
auguagaaaggcaugaagcaguu

SEQ ID NO: 1167 - RNA, 21 nt, Artificial Sequence
  source: /note="Description of Artificial Sequence: Synthetic oligonucleotide"
  modified_base (21)..(21): Inverted abasic nucleotide
cugcuucaugccuuucuacan

SEQ ID NO: 1168 - RNA, 23 nt, Artificial Sequence
  source: /note="Description of Artificial Sequence: Synthetic oligonucleotide"
auguagaaaggcaugaagcaguu

SEQ ID NO: 1169 - DNA, 21 bp, Artificial Sequence
  source: /note="Description of Artificial Sequence: Synthetic oligonucleotide"
  source: /note="Description of Combined DNA/RNA Molecule: Synthetic oligonucleotide"
ugcuucaugccuuucuacaga

SEQ ID NO: 1170 - RNA, 23 nt, Artificial Sequence
  source: /note="Description of Artificial Sequence: Synthetic oligonucleotide"
ucuguagaaaggcaugaagcauu

SEQ ID NO: 1171 - DNA, 21 bp, Artificial Sequence
  source: /note="Description of Artificial Sequence: Synthetic oligonucleotide"
  source: /note="Description of Combined DNA/RNA Molecule: Synthetic oligonucleotide"
ugcuucaugccuuucuacaga

SEQ ID NO: 1172 - RNA, 23 nt, Artificial Sequence
  source: /note="Description of Artificial Sequence: Synthetic oligonucleotide"
ucuguagaaaggcaugaagcauu

SEQ ID NO: 1173 - DNA, 21 bp, Artificial Sequence
  source: /note="Description of Artificial Sequence: Synthetic oligonucleotide"
  source: /note="Description of Combined DNA/RNA Molecule: Synthetic oligonucleotide"
ugcuucaugccuuucuacaga

SEQ ID NO: 1174 - RNA, 23 nt, Artificial Sequence
  source: /note="Description of Artificial Sequence: Synthetic oligonucleotide"
ucuguagaaaggcaugaagcauu

SEQ ID NO: 1175 - DNA, 21 bp, Artificial Sequence
  source: /note="Description of Artificial Sequence: Synthetic oligonucleotide"
  source: /note="Description of Combined DNA/RNA Molecule: Synthetic oligonucleotide"
ugcuucaugccuuucuacaga

SEQ ID NO: 1176 - RNA, 23 nt, Artificial Sequence
  source: /note="Description of Artificial Sequence: Synthetic oligonucleotide"
ucuguagaaaggcaugaagcauu

SEQ ID NO: 1177 - DNA, 21 bp, Artificial Sequence
  source: /note="Description of Artificial Sequence: Synthetic oligonucleotide"
  source: /note="Description of Combined DNA/RNA Molecule: Synthetic oligonucleotide"
ugcuucaugccuuucuacaga

SEQ ID NO: 1178 - RNA, 23 nt, Artificial Sequence
  source: /note="Description of Artificial Sequence: Synthetic oligonucleotide"
ucuguagaaaggcaugaagcauu

SEQ ID NO: 1179 - DNA, 21 bp, Artificial Sequence
  source: /note="Description of Artificial Sequence: Synthetic oligonucleotide"
  source: /note="Description of Combined DNA/RNA Molecule: Synthetic oligonucleotide"
ugcuucaugccuuucuacaga

SEQ ID NO: 1180 - RNA, 23 nt, Artificial Sequence
  source: /note="Description of Artificial Sequence: Synthetic oligonucleotide"
  modified_base (2)..(2): Abasic nucleotide
unuguagaaaggcaugaagcauu

SEQ ID NO: 1181 - DNA, 21 bp, Artificial Sequence
  source: /note="Description of Artificial Sequence: Synthetic oligonucleotide"
  source: /note="Description of Combined DNA/RNA Molecule: Synthetic oligonucleotide"
ugcuucaugccuuucuacaga

SEQ ID NO: 1182 - RNA, 23 nt, Artificial Sequence
  source: /note="Description of Artificial Sequence: Synthetic oligonucleotide"
  modified_base (3)..(3): Abasic nucleotide
ucnguagaaaggcaugaagcauu

SEQ ID NO: 1183 - DNA, 21 bp, Artificial Sequence
  source: /note="Description of Artificial Sequence: Synthetic oligonucleotide"
  source: /note="Description of Combined DNA/RNA Molecule: Synthetic oligonucleotide"
ugcuucaugccuuucuacaga

SEQ ID NO: 1184 - RNA, 23 nt, Artificial Sequence
  source: /note="Description of Artificial Sequence: Synthetic oligonucleotide"
  modified_base (4)..(4): Abasic nucleotide
ucunuagaaaggcaugaagcauu

SEQ ID NO: 1185 - DNA, 21 bp, Artificial Sequence
  source: /note="Description of Artificial Sequence: Synthetic oligonucleotide"
  source: /note="Description of Combined DNA/RNA Molecule: Synthetic oligonucleotide"
ugcuucaugccuuucuacaga

SEQ ID NO: 1186 - RNA, 23 nt, Artificial Sequence
  source: /note="Description of Artificial Sequence: Synthetic oligonucleotide"
  modified_base (5)..(5): Abasic nucleotide
ucugnagaaaggcaugaagcauu

SEQ ID NO: 1187 - DNA, 21 bp, Artificial Sequence
  source: /note="Description of Artificial Sequence: Synthetic oligonucleotide"
  source: /note="Description of Combined DNA/RNA Molecule: Synthetic oligonucleotide"
ugcuucaugccuuucuacaga

SEQ ID NO: 1188 - RNA, 23 nt, Artificial Sequence
  source: /note="Description of Artificial Sequence: Synthetic oligonucleotide"
  modified_base (6)..(6): Abasic nucleotide
ucugungaaaggcaugaagcauu

SEQ ID NO: 1189 - DNA, 21 bp, Artificial Sequence
  source: /note="Description of Artificial Sequence: Synthetic oligonucleotide"
  source: /note="Description of Combined DNA/RNA Molecule: Synthetic oligonucleotide"
ugcuucaugccuuucuacaga

SEQ ID NO: 1190 - RNA, 23 nt, Artificial Sequence
  source: /note="Description of Artificial Sequence: Synthetic oligonucleotide"
  modified_base (7)..(7): Abasic nucleotide
ucuguanaaaggcaugaagcauu

SEQ ID NO: 1191 - DNA, 21 bp, Artificial Sequence
  source: /note="Description of Artificial Sequence: Synthetic oligonucleotide"
  source: /note="Description of Combined DNA/RNA Molecule: Synthetic oligonucleotide"
ugcuucaugccuuucuacaga

SEQ ID NO: 1192 - RNA, 23 nt, Artificial Sequence
  source: /note="Description of Artificial Sequence: Synthetic oligonucleotide"
  modified_base (8)..(8): Abasic nucleotide
ucuguagnaaggcaugaagcauu

SEQ ID NO: 1193 - DNA, 21 bp, Artificial Sequence
  source: /note="Description of Artificial Sequence: Synthetic oligonucleotide"
  source: /note="Description of Combined DNA/RNA Molecule: Synthetic oligonucleotide"
ucaugccuuucuacaguggct

SEQ ID NO: 1194 - RNA, 23 nt, Artificial Sequence
  source: /note="Description of Artificial Sequence: Synthetic oligonucleotide"
agccacuguagaaaggcaugauu

SEQ ID NO: 1195 - RNA, 21 nt, Artificial Sequence
  source: /note="Description of Artificial Sequence: Synthetic oligonucleotide"
  modified_base (21)..(21): Inverted abasic nucleotide
ucaugccuuucuacaguggcn

SEQ ID NO: 1196 - RNA, 23 nt, Artificial Sequence
  source: /note="Description of Artificial Sequence: Synthetic oligonucleotide"
ugccacuguagaaaggcaugauu

SEQ ID NO: 1197 - DNA, 21 bp, Artificial Sequence
  source: /note="Description of Artificial Sequence: Synthetic oligonucleotide"
  source: /note="Description of Combined DNA/RNA Molecule: Synthetic oligonucleotide"
ucaugccuuucuacaguggca

SEQ ID NO: 1198 - RNA, 23 nt, Artificial Sequence
  source: /note="Description of Artificial Sequence: Synthetic oligonucleotide"
ugccacuguagaaaggcaugauu

SEQ ID NO: 1199 - DNA, 21 bp, Artificial Sequence
  source: /note="Description of Artificial Sequence: Synthetic oligonucleotide"
  source: /note="Description of Combined DNA/RNA Molecule: Synthetic oligonucleotide"
uccugcuucaugccuuucuat

SEQ ID NO: 1200 - RNA, 23 nt, Artificial Sequence
  source: /note="Description of Artificial Sequence: Synthetic oligonucleotide"
auagaaaggcaugaagcaggauu

SEQ ID NO: 1201 - RNA, 21 nt, Artificial Sequence
  source: /note="Description of Artificial Sequence: Synthetic oligonucleotide"
  modified_base (21)..(21): Inverted abasic nucleotide
uccugcuucaugccuuucuan

SEQ ID NO: 1202 - RNA, 23 nt, Artificial Sequence
  source: /note="Description of Artificial Sequence: Synthetic oligonucleotide"
uuagaaaggcaugaagcaggauu

SEQ ID NO: 1203 - DNA, 21 bp, Artificial Sequence
  source: /note="Description of Artificial Sequence: Synthetic oligonucleotide"
  source: /note="Description of Combined DNA/RNA Molecule: Synthetic oligonucleotide"
uccugcuucaugccuuucuaa

SEQ ID NO: 1204 - RNA, 23 nt, Artificial Sequence
  source: /note="Description of Artificial Sequence: Synthetic oligonucleotide"
uuagaaaggcaugaagcaggauu

SEQ ID NO: 1205 - DNA, 21 bp, Artificial Sequence
  source: /note="Description of Artificial Sequence: Synthetic oligonucleotide"
  source: /note="Description of Combined DNA/RNA Molecule: Synthetic oligonucleotide"
uauguuccugcuucaugccut

SEQ ID NO: 1206 - RNA, 23 nt, Artificial Sequence
  source: /note="Description of Artificial Sequence: Synthetic oligonucleotide"
aaggcaugaagcaggaacauauu

SEQ ID NO: 1207 - RNA, 21 nt, Artificial Sequence
  source: /note="Description of Artificial Sequence: Synthetic oligonucleotide"
  modified_base (21)..(21): Inverted abasic nucleotide
uauguuccugcuucaugccun

SEQ ID NO: 1208 - RNA, 23 nt, Artificial Sequence
  source: /note="Description of Artificial Sequence: Synthetic oligonucleotide"
uaggcaugaagcaggaacauauu

SEQ ID NO: 1209 - DNA, 21 bp, Artificial Sequence
  source: /note="Description of Artificial Sequence: Synthetic oligonucleotide"
  source: /note="Description of Combined DNA/RNA Molecule: Synthetic oligonucleotide"
uauguuccugcuucaugccua

SEQ ID NO: 1210 - RNA, 23 nt, Artificial Sequence
  source: /note="Description of Artificial Sequence: Synthetic oligonucleotide"
uaggcaugaagcaggaacauauu

SEQ ID NO: 1211 - RNA, 21 nt, Artificial Sequence
  source: /note="Description of Artificial Sequence: Synthetic oligonucleotide"
  modified_base (21)..(21): Inverted abasic nucleotide
uccugcuucaugccuuucuan

SEQ ID NO: 1212 - RNA, 23 nt, Artificial Sequence
  source: /note="Description of Artificial Sequence: Synthetic oligonucleotide"
auagaaaggcaugaagcaggauu

SEQ ID NO: 1213 - RNA, 21 nt, Artificial Sequence
  source: /note="Description of Artificial Sequence: Synthetic oligonucleotide"
  modified_base (21)..(21): Inverted abasic nucleotide
uauguuccugcuucaugccun

SEQ ID NO: 1214 - RNA, 23 nt, Artificial Sequence
  source: /note="Description of Artificial Sequence: Synthetic oligonucleotide"
aaggcaugaagcaggaacauauu

SEQ ID NO: 1215 - DNA, 21 bp, Artificial Sequence
  source: /note="Description of Artificial Sequence: Synthetic oligonucleotide"
  source: /note="Description of Combined DNA/RNA Molecule: Synthetic oligonucleotide"
ucaugccuuucuacaguggct

SEQ ID NO: 1216 - RNA, 23 nt, Artificial Sequence
  source: /note="Description of Artificial Sequence: Synthetic oligonucleotide"
agccacuguagaaaggcaugauu

SEQ ID NO: 1217 - DNA, 21 bp, Artificial Sequence
  source: /note="Description of Artificial Sequence: Synthetic oligonucleotide"
  source: /note="Description of Combined DNA/RNA Molecule: Synthetic oligonucleotide"
uccugcuucaugccuuucuat

SEQ ID NO: 1218 - RNA, 23 nt, Artificial Sequence
  source: /note="Description of Artificial Sequence: Synthetic oligonucleotide"
auagaaaggcaugaagcaggauu

SEQ ID NO: 1219 - DNA, 21 bp, Artificial Sequence
  source: /note="Description of Artificial Sequence: Synthetic oligonucleotide"
  source: /note="Description of Combined DNA/RNA Molecule: Synthetic oligonucleotide"
uccugcuucaugccuuucuaa

SEQ ID NO: 1220 - RNA, 23 nt, Artificial Sequence
  source: /note="Description of Artificial Sequence: Synthetic oligonucleotide"
uuagaaaggcaugaagcaggauu

SEQ ID NO: 1221 - DNA, 21 bp, Artificial Sequence
  source: /note="Description of Artificial Sequence: Synthetic oligonucleotide"
  source: /note="Description of Combined DNA/RNA Molecule: Synthetic oligonucleotide"
uauguuccugcuucaugccua

SEQ ID NO: 1222 - RNA, 23 nt, Artificial Sequence
  source: /note="Description of Artificial Sequence: Synthetic oligonucleotide"
uaggcaugaagcaggaacauauu

SEQ ID NO: 1223 - DNA, 21 bp, Artificial Sequence
  source: /note="Description of Artificial Sequence: Synthetic oligonucleotide"
  source: /note="Description of Combined DNA/RNA Molecule: Synthetic oligonucleotide"
ugcuucaugccuuucuacaga

SEQ ID NO: 1224 - RNA, 23 nt, Artificial Sequence
  source: /note="Description of Artificial Sequence: Synthetic oligonucleotide"
ucuguagaaaggcaugaagcauu

SEQ ID NO: 1225 - RNA, 21 nt, Artificial Sequence
  source: /note="Description of Artificial Sequence: Synthetic oligonucleotide"
  modified_base (21)..(21): Inverted abasic nucleotide
cugcuucaugccuuucuacan

SEQ ID NO: 1226 - RNA, 23 nt, Artificial Sequence
  source: /note="Description of Artificial Sequence: Synthetic oligonucleotide"
auguagaaaggcaugaagcaguu

SEQ ID NO: 1227 - RNA, 21 nt, Artificial Sequence
  source: /note="Description of Artificial Sequence: Synthetic oligonucleotide"
  modified_base (21)..(21): Inverted abasic nucleotide
cugcuucaugccuuucuacan

SEQ ID NO: 1228 - RNA, 23 nt, Artificial Sequence
  source: /note="Description of Artificial Sequence: Synthetic oligonucleotide"
auguagaaaggcaugaagcaguu

SEQ ID NO: 1229 - RNA, 21 nt, Artificial Sequence
  source: /note="Description of Artificial Sequence: Synthetic oligonucleotide"
  modified_base (21)..(21): Inverted abasic nucleotide
cugcuucaugccuuucuacan

SEQ ID NO: 1230 - RNA, 23 nt, Artificial Sequence
  source: /note="Description of Artificial Sequence: Synthetic oligonucleotide"
auguagaaaggcaugaagcaguu

SEQ ID NO: 1231 - RNA, 21 nt, Artificial Sequence
  source: /note="Description of Artificial Sequence: Synthetic oligonucleotide"
  modified_base (21)..(21): Inverted abasic nucleotide
cugcuucaugccuuucuacan

SEQ ID NO: 1232 - RNA, 23 nt, Artificial Sequence
  source: /note="Description of Artificial Sequence: Synthetic oligonucleotide"
auguagaaaggcaugaagcaguu

SEQ ID NO: 1233 - RNA, 21 nt, Artificial Sequence
  source: /note="Description of Artificial Sequence: Synthetic oligonucleotide"
  modified_base (21)..(21): Inverted abasic nucleotide
cugcuucaugccuuucuacan

SEQ ID NO: 1234 - RNA, 23 nt, Artificial Sequence
  source: /note="Description of Artificial Sequence: Synthetic oligonucleotide"
auguagaaaggcaugaagcaguu

SEQ ID NO: 1235 - RNA, 21 nt, Artificial Sequence
  source: /note="Description of Artificial Sequence: Synthetic oligonucleotide"
  modified_base (21)..(21): Inverted abasic nucleotide
cugcuucaugccuuucuacan

SEQ ID NO: 1236 - RNA, 23 nt, Artificial Sequence
  source: /note="Description of Artificial Sequence: Synthetic oligonucleotide"
auguagaaaggcaugaagcaguu

SEQ ID NO: 1237 - RNA, 21 nt, Artificial Sequence
  source: /note="Description of Artificial Sequence: Synthetic oligonucleotide"
  modified_base (21)..(21): Inverted abasic nucleotide
cugcuucaugccuuucuacan

SEQ ID NO: 1238 - RNA, 23 nt, Artificial Sequence
  source: /note="Description of Artificial Sequence: Synthetic oligonucleotide"
auguagaaaggcaugaagcaguu

SEQ ID NO: 1239 - RNA, 21 nt, Artificial Sequence
  source: /note="Description of Artificial Sequence: Synthetic oligonucleotide"
  modified_base (21)..(21): Inverted abasic nucleotide
cugcuucaugccuuucuacan

SEQ ID NO: 1240 - RNA, 23 nt, Artificial Sequence
  source: /note="Description of Artificial Sequence: Synthetic oligonucleotide"
auguagaaaggcaugaagcaguu

SEQ ID NO: 1241 - RNA, 21 nt, Artificial Sequence
  source: /note="Description of Artificial Sequence: Synthetic oligonucleotide"
  modified_base (21)..(21): Inverted abasic nucleotide
cugcuucaugccuuucuacan

SEQ ID NO: 1242 - RNA, 23 nt, Artificial Sequence
  source: /note="Description of Artificial Sequence: Synthetic oligonucleotide"
auguagaaaggcaugaagcaguu

SEQ ID NO: 1243 - DNA, 21 bp, Artificial Sequence
  source: /note="Description of Artificial Sequence: Synthetic oligonucleotide"
  source: /note="Description of Combined DNA/RNA Molecule: Synthetic oligonucleotide"
  modified_base (21)..(21): Inverted abasic nucleotide
cugcuucaugccutucuacan

SEQ ID NO: 1244 - RNA, 23 nt, Artificial Sequence
  source: /note="Description of Artificial Sequence: Synthetic oligonucleotide"
auguagaaaggcaugaagcaguu

SEQ ID NO: 1245 - DNA, 21 bp, Artificial Sequence
  source: /note="Description of Artificial Sequence: Synthetic oligonucleotide"
  source: /note="Description of Combined DNA/RNA Molecule: Synthetic oligonucleotide"
  modified_base (21)..(21): Inverted abasic nucleotide
cugcuucaugcctuucuacan

SEQ ID NO: 1246 - RNA, 23 nt, Artificial Sequence
  source: /note="Description of Artificial Sequence: Synthetic oligonucleotide"
auguagaaaggcaugaagcaguu

SEQ ID NO: 1247 - DNA, 21 bp, Artificial Sequence
  source: /note="Description of Artificial Sequence: Synthetic oligonucleotide"
  source: /note="Description of Combined DNA/RNA Molecule: Synthetic oligonucleotide"
  modified_base (21)..(21): Inverted abasic nucleotide
cugcuucaugccuutcuacan

SEQ ID NO: 1248 - RNA, 23 nt, Artificial Sequence
  source: /note="Description of Artificial Sequence: Synthetic oligonucleotide"
auguagaaaggcaugaagcaguu

SEQ ID NO: 1249 - DNA, 21 bp, Artificial Sequence
  source: /note="Description of Artificial Sequence: Synthetic oligonucleotide"
  source: /note="Description of Combined DNA/RNA Molecule: Synthetic oligonucleotide"
  modified_base (21)..(21): Inverted abasic nucleotide
cugcuucaugccuuuctacan

SEQ ID NO: 1250 - RNA, 23 nt, Artificial Sequence
  source: /note="Description of Artificial Sequence: Synthetic oligonucleotide"
auguagaaaggcaugaagcaguu

SEQ ID NO: 1251 - RNA, 21 nt, Artificial Sequence
  source: /note="Description of Artificial Sequence: Synthetic oligonucleotide"
  modified_base (21)..(21): Inverted abasic nucleotide
cugcuucaugccuuucuacan

SEQ ID NO: 1252 - RNA, 23 nt, Artificial Sequence
  source: /note="Description of Artificial Sequence: Synthetic oligonucleotide"
auguagaaaggcaugaagcaguu

SEQ ID NO: 1253 - RNA, 21 nt, Artificial Sequence
  source: /note="Description of Artificial Sequence: Synthetic oligonucleotide"
  modified_base (21)..(21): Inverted abasic nucleotide
cugcuucaugccuuucuacan

SEQ ID NO: 1254 - RNA, 23 nt, Artificial Sequence
  source: /note="Description of Artificial Sequence: Synthetic oligonucleotide"
auguagaaaggcaugaagcaguu

SEQ ID NO: 1255 - DNA, 21 bp, Artificial Sequence
  source: /note="Description of Artificial Sequence: Synthetic oligonucleotide"
  source: /note="Description of Combined DNA/RNA Molecule: Synthetic oligonucleotide"
  modified_base (21)..(21): Inverted abasic nucleotide
cugcuucaugccuutcuacan

SEQ ID NO: 1256 - RNA, 23 nt, Artificial Sequence
  source: /note="Description of Artificial Sequence: Synthetic oligonucleotide"
  modified_base (7)..(7): Abasic nucleotide
auguagnaaggcaugaagcaguu

SEQ ID NO: 1257 - DNA, 21 bp, Artificial Sequence
  source: /note="Description of Artificial Sequence: Synthetic oligonucleotide"
  source: /note="Description of Combined DNA/RNA Molecule: Synthetic oligonucleotide"
  modified_base (21)..(21): Inverted abasic nucleotide
cugcuucaugccuuuctacan

SEQ ID NO: 1258 - RNA, 23 nt, Artificial Sequence
  source: /note="Description of Artificial Sequence: Synthetic oligonucleotide"
  modified_base (5)..(5): Abasic nucleotide
augungaaaggcaugaagcaguu

SEQ ID NO: 1259 - RNA, 21 nt, Artificial Sequence
  source: /note="Description of Artificial Sequence: Synthetic oligonucleotide"
  modified_base (21)..(21): Inverted abasic nucleotide
cugcuucaugccuuucuacan

SEQ ID NO: 1260 - RNA, 23 nt, Artificial Sequence
  source: /note="Description of Artificial Sequence: Synthetic oligonucleotide"
  modified_base (4)..(4): Abasic nucleotide
augnagaaaggcaugaagcaguu

SEQ ID NO: 1261 - RNA, 21 nt, Artificial Sequence
  source: /note="Description of Artificial Sequence: Synthetic oligonucleotide"
  modified_base (21)..(21): Inverted abasic nucleotide
cugcuucaugccuuucuacan

SEQ ID NO: 1262 - RNA, 23 nt, Artificial Sequence
  source: /note="Description of Artificial Sequence: Synthetic oligonucleotide"
auguagaaaggcaugaagcaguu

SEQ ID NO: 1263 - RNA, 21 nt, Artificial Sequence
  source: /note="Description of Artificial Sequence: Synthetic oligonucleotide"
  modified_base (21)..(21): Inverted abasic nucleotide
cugcuucaugccuuucuacan

SEQ ID NO: 1264 - RNA, 23 nt, Artificial Sequence
  source: /note="Description of Artificial Sequence: Synthetic oligonucleotide"
auguagaaaggcaugaagcaguu

SEQ ID NO: 1265 - DNA, 21 bp, Artificial Sequence
  source: /note="Description of Artificial Sequence: Synthetic oligonucleotide"
  source: /note="Description of Combined DNA/RNA Molecule: Synthetic oligonucleotide"
  modified_base (21)..(21): Inverted abasic nucleotide
cugcuucaugccutucuacan

SEQ ID NO: 1266 - RNA, 23 nt, Artificial Sequence
  source: /note="Description of Artificial Sequence: Synthetic oligonucleotide"
auguagaaaggcaugaagcaguu

SEQ ID NO: 1267 - DNA, 21 bp, Artificial Sequence
  source: /note="Description of Artificial Sequence: Synthetic oligonucleotide"
  source: /note="Description of Combined DNA/RNA Molecule: Synthetic oligonucleotide"
  modified_base (21)..(21): Inverted abasic nucleotide
cugcuucaugccutucuacan

SEQ ID NO: 1268 - RNA, 23 nt, Artificial Sequence
  source: /note="Description of Artificial Sequence: Synthetic oligonucleotide"
auguagaaaggcaugaagcaguu

SEQ ID NO: 1269 - DNA, 21 bp, Artificial Sequence
  source: /note="Description of Artificial Sequence: Synthetic oligonucleotide"
  source: /note="Description of Combined DNA/RNA Molecule: Synthetic oligonucleotide"
  modified_base (21)..(21): Inverted abasic nucleotide
cugcuucaugccutucuacan

SEQ ID NO: 1270 - RNA, 23 nt, Artificial Sequence
  source: /note="Description of Artificial Sequence: Synthetic oligonucleotide"
auguagaaaggcaugaagcaguu

SEQ ID NO: 1271 - DNA, 21 bp, Artificial Sequence
  source: /note="Description of Artificial Sequence: Synthetic oligonucleotide"
  source: /note="Description of Combined DNA/RNA Molecule: Synthetic oligonucleotide"
  modified_base (21)..(21): Inverted abasic nucleotide
cugcuucaugccutucuacan

SEQ ID NO: 1272 - RNA, 23 nt, Artificial Sequence
  source: /note="Description of Artificial Sequence: Synthetic oligonucleotide"
auguagaaaggcaugaagcaguu

SEQ ID NO: 1273 - DNA, 21 bp, Artificial Sequence
  source: /note="Description of Artificial Sequence: Synthetic oligonucleotide"
  source: /note="Description of Combined DNA/RNA Molecule: Synthetic oligonucleotide"
ugcuucaugccuuucuacaga

SEQ ID NO: 1274 - RNA, 23 nt, Artificial Sequence
  source: /note="Description of Artificial Sequence: Synthetic oligonucleotide"
  modified_base (5)..(5): Abasic nucleotide
ucugnagaaaggcaugaagcauu

SEQ ID NO: 1275 - DNA, 21 bp, Artificial Sequence
  source: /note="Description of Artificial Sequence: Synthetic oligonucleotide"
  source: /note="Description of Combined DNA/RNA Molecule: Synthetic oligonucleotide"
ugcuucaugccuuuctacaga

SEQ ID NO: 1276 - RNA, 23 nt, Artificial Sequence
  source: /note="Description of Artificial Sequence: Synthetic oligonucleotide"
  modified_base (6)..(6): Abasic nucleotide
ucugungaaaggcaugaagcauu

SEQ ID NO: 1277 - DNA, 21 bp, Artificial Sequence
  source: /note="Description of Artificial Sequence: Synthetic oligonucleotide"
  source: /note="Description of Combined DNA/RNA Molecule: Synthetic oligonucleotide"
ugcuucaugccuutcuacaga

SEQ ID NO: 1278 - RNA, 23 nt, Artificial Sequence
  source: /note="Description of Artificial Sequence: Synthetic oligonucleotide"
  modified_base (8)..(8): Abasic nucleotide
ucuguagnaaggcaugaagcauu

SEQ ID NO: 1279 - DNA, 21 bp, Artificial Sequence
  source: /note="Description of Artificial Sequence: Synthetic oligonucleotide"
  source: /note="Description of Combined DNA/RNA Molecule: Synthetic oligonucleotide"
ugcuucaugccuuucuacaga

SEQ ID NO: 1280 - RNA, 23 nt, Artificial Sequence
  source: /note="Description of Artificial Sequence: Synthetic oligonucleotide"
ucuguagaaaggcaugaagcauu

SEQ ID NO: 1281 - DNA, 21 bp, Artificial Sequence
  source: /note="Description of Artificial Sequence: Synthetic oligonucleotide"
  source: /note="Description of Combined DNA/RNA Molecule: Synthetic oligonucleotide"
ugcuucaugccuuucuacaga

SEQ ID NO: 1282 - RNA, 23 nt, Artificial Sequence
  source: /note="Description of Artificial Sequence: Synthetic oligonucleotide"
ucuguagaaaggcaugaagcauu

SEQ ID NO: 1283 - DNA, 21 bp, Artificial Sequence
  source: /note="Description of Artificial Sequence: Synthetic oligonucleotide"
  source: /note="Description of Combined DNA/RNA Molecule: Synthetic oligonucleotide"
ugcuucaugccuuuctacaga

SEQ ID NO: 1284 - RNA, 23 nt, Artificial Sequence
  source: /note="Description of Artificial Sequence: Synthetic oligonucleotide"
ucuguagaaaggcaugaagcauu

SEQ ID NO: 1285 - DNA, 21 bp, Artificial Sequence
  source: /note="Description of Artificial Sequence: Synthetic oligonucleotide"
  source: /note="Description of Combined DNA/RNA Molecule: Synthetic oligonucleotide"
ugcuucaugccuuucuacaga

SEQ ID NO: 1286 - RNA, 23 nt, Artificial Sequence
  source: /note="Description of Artificial Sequence: Synthetic oligonucleotide"
  modified_base (2)..(2): Abasic nucleotide
unuguagaaaggcaugaagcauu

SEQ ID NO: 1287 - DNA, 21 bp, Artificial Sequence
  source: /note="Description of Artificial Sequence: Synthetic oligonucleotide"
  source: /note="Description of Combined DNA/RNA Molecule: Synthetic oligonucleotide"
ugcuucaugccuuucuacaga

SEQ ID NO: 1288 - RNA, 23 nt, Artificial Sequence
  source: /note="Description of Artificial Sequence: Synthetic oligonucleotide"
  modified_base (3)..(3): Abasic nucleotide
ucnguagaaaggcaugaagcauu

SEQ ID NO: 1289 - RNA, 21 nt, Artificial Sequence
  source: /note="Description of Artificial Sequence: Synthetic oligonucleotide"
  modified_base (21)..(21): Inverted abasic nucleotide
ucaugccuuucuacaguggcn

SEQ ID NO: 1290 - RNA, 23 nt, Artificial Sequence
  source: /note="Description of Artificial Sequence: Synthetic oligonucleotide"
  modified_base (6)..(6): Abasic nucleotide
agccanuguagaaaggcaugauu

SEQ ID NO: 1291 - DNA, 21 bp, Artificial Sequence
  source: /note="Description of Artificial Sequence: Synthetic oligonucleotide"
  source: /note="Description of Combined DNA/RNA Molecule: Synthetic oligonucleotide"
  modified_base (21)..(21): Inverted abasic nucleotide
ucaugccuuucuacagtggcn

SEQ ID NO: 1292 - RNA, 23 nt, Artificial Sequence
  source: /note="Description of Artificial Sequence: Synthetic oligonucleotide"
  modified_base (6)..(6): Abasic nucleotide
agccanuguagaaaggcaugauu

SEQ ID NO: 1293 - RNA, 21 nt, Artificial Sequence
  source: /note="Description of Artificial Sequence: Synthetic oligonucleotide"
  modified_base (21)..(21): Inverted abasic nucleotide
ucaugccuuucuacaguggcn

SEQ ID NO: 1294 - RNA, 23 nt, Artificial Sequence
  source: /note="Description of Artificial Sequence: Synthetic oligonucleotide"
  modified_base (6)..(6): Abasic nucleotide
agccanuguagaaaggcaugauu

SEQ ID NO: 1295 - RNA, 21 nt, Artificial Sequence
  source: /note="Description of Artificial Sequence: Synthetic oligonucleotide"
ggaaagacuguuccaaaaauu

SEQ ID NO: 1296 - RNA, 21 nt, Artificial Sequence
  source: /note="Description of Artificial Sequence: Synthetic oligonucleotide"
uuuuuggaacagucuuuccuu

SEQ ID NO: 1297 - RNA, 21 nt, Artificial Sequence
  source: /note="Description of Artificial Sequence: Synthetic oligonucleotide"
gguauguuccugcuucauguu

SEQ ID NO: 1298 - RNA, 21 nt, Artificial Sequence
  source: /note="Description of Artificial Sequence: Synthetic oligonucleotide"
caugaagcaggaacauaccuu

SEQ ID NO: 1299 - RNA, 21 nt, Artificial Sequence
  source: /note="Description of Artificial Sequence: Synthetic oligonucleotide"
guauguuccugcuucaugcuu

SEQ ID NO: 1300 - RNA, 21 nt, Artificial Sequence
  source: /note="Description of Artificial Sequence: Synthetic oligonucleotide"
gcaugaagcaggaacauacuu

SEQ ID NO: 1301 - RNA, 21 nt, Artificial Sequence
  source: /note="Description of Artificial Sequence: Synthetic oligonucleotide"
uguuccugcuucaugcccuuu

SEQ ID NO: 1302 - RNA, 21 nt, Artificial Sequence
  source: /note="Description of Artificial Sequence: Synthetic oligonucleotide"
agggcaugaagcaggaacauu

SEQ ID NO: 1303 - RNA, 21 nt, Artificial Sequence
  source: /note="Description of Artificial Sequence: Synthetic oligonucleotide"
gcuucaugcccuucuacaguu

SEQ ID NO: 1304 - RNA, 21 nt, Artificial Sequence
  source: /note="Description of Artificial Sequence: Synthetic oligonucleotide"
cuguagaagggcaugaagcuu

SEQ ID NO: 1305 - RNA, 21 nt, Artificial Sequence
  source: /note="Description of Artificial Sequence: Synthetic oligonucleotide"
cuucaugcccuucuacaguuu

SEQ ID NO: 1306 - RNA, 21 nt, Artificial Sequence
  source: /note="Description of Artificial Sequence: Synthetic oligonucleotide"
acuguagaagggcaugaaguu

SEQ ID NO: 1307 - RNA, 21 nt, Artificial Sequence
  source: /note="Description of Artificial Sequence: Synthetic oligonucleotide"
gcggcuuccugggcuucuauu

SEQ ID NO: 1308 - RNA, 21 nt, Artificial Sequence
  source: /note="Description of Artificial Sequence: Synthetic oligonucleotide"
uagaagcccaggaagccgcuu

SEQ ID NO: 1309 - RNA, 21 nt, Artificial Sequence
  source: /note="Description of Artificial Sequence: Synthetic oligonucleotide"
guuccugcuucaugcccuuuu

SEQ ID NO: 1310 - RNA, 21 nt, Artificial Sequence
  source: /note="Description of Artificial Sequence: Synthetic oligonucleotide"
aagggcaugaagcaggaacuu

SEQ ID NO: 1311 - RNA, 21 nt, Artificial Sequence
  source: /note="Description of Artificial Sequence: Synthetic oligonucleotide"
auggcuuccagauaugccuuu

SEQ ID NO: 1312 - RNA, 21 nt, Artificial Sequence
  source: /note="Description of Artificial Sequence: Synthetic oligonucleotide"
aggcauaucuggaagccauuu

SEQ ID NO: 1313 - RNA, 21 nt, Artificial Sequence
  source: /note="Description of Artificial Sequence: Synthetic oligonucleotide"
ccugcuucaugcccuucuauu

SEQ ID NO: 1314 - RNA, 21 nt, Artificial Sequence
  source: /note="Description of Artificial Sequence: Synthetic oligonucleotide"
uagaagggcaugaagcagguu

SEQ ID NO: 1315 - RNA, 21 nt, Artificial Sequence
  source: /note="Description of Artificial Sequence: Synthetic oligonucleotide"
uucaugcccuucuacaguuuu

SEQ ID NO: 1316 - RNA, 21 nt, Artificial Sequence
  source: /note="Description of Artificial Sequence: Synthetic oligonucleotide"
aacuguagaagggcaugaauu

SEQ ID NO: 1317 - RNA, 21 nt, Artificial Sequence
  source: /note="Description of Artificial Sequence: Synthetic oligonucleotide"
uucaugcccuucuacaguguu

SEQ ID NO: 1318 - RNA, 21 nt, Artificial Sequence
  source: /note="Description of Artificial Sequence: Synthetic oligonucleotide"
cacuguagaagggcaugaauu

SEQ ID NO: 1319 - RNA, 21 nt, Artificial Sequence
  source: /note="Description of Artificial Sequence: Synthetic oligonucleotide"
gcuucaugcccuucuacauuu

SEQ ID NO: 1320 - RNA, 21 nt, Artificial Sequence
  source: /note="Description of Artificial Sequence: Synthetic oligonucleotide"
auguagaagggcaugaagcuu

SEQ ID NO: 1321 - RNA, 21 nt, Artificial Sequence
  source: /note="Description of Artificial Sequence: Synthetic oligonucleotide"
gguccagccugaacuucuuuu

SEQ ID NO: 1322 - RNA, 21 nt, Artificial Sequence
  source: /note="Description of Artificial Sequence: Synthetic oligonucleotide"
aagaaguucaggcuggaccuu

SEQ ID NO: 1323 - RNA, 21 nt, Artificial Sequence
  source: /note="Description of Artificial Sequence: Synthetic oligonucleotide"
gcggcuuccugggcuucuauu

SEQ ID NO: 1324 - RNA, 21 nt, Artificial Sequence
  source: /note="Description of Artificial Sequence: Synthetic oligonucleotide"
uagaagcccaggaagccgcuu

SEQ ID NO: 1325 - RNA, 21 nt, Artificial Sequence
  source: /note="Description of Artificial Sequence: Synthetic oligonucleotide"
gcggcuuccugggcuucuauu

SEQ ID NO: 1326 - RNA, 21 nt, Artificial Sequence
  source: /note="Description of Artificial Sequence: Synthetic oligonucleotide"
uagaagcccaggaagccgcuu

SEQ ID NO: 1327 - RNA, 21 nt, Artificial Sequence
  source: /note="Description of Artificial Sequence: Synthetic oligonucleotide"
guuccugcuucaugcccuuuu

SEQ ID NO: 1328 - RNA, 21 nt, Artificial Sequence
  source: /note="Description of Artificial Sequence: Synthetic oligonucleotide"
aagggcaugaagcaggaacuu

SEQ ID NO: 1329 - RNA, 21 nt, Artificial Sequence
  source: /note="Description of Artificial Sequence: Synthetic oligonucleotide"
guuccugcuucaugcccuuuu

SEQ ID NO: 1330 - RNA, 21 nt, Artificial Sequence
  source: /note="Description of Artificial Sequence: Synthetic oligonucleotide"
aagggcaugaagcaggaacuu

SEQ ID NO: 1331 - RNA, 21 nt, Artificial Sequence
  source: /note="Description of Artificial Sequence: Synthetic oligonucleotide"
ccugcuucaugcccuucuauu

SEQ ID NO: 1332 - RNA, 21 nt, Artificial Sequence
  source: /note="Description of Artificial Sequence: Synthetic oligonucleotide"
uagaagggcaugaagcagguu

SEQ ID NO: 1333 - RNA, 21 nt, Artificial Sequence
  source: /note="Description of Artificial Sequence: Synthetic oligonucleotide"
ccugcuucaugcccuucuauu

SEQ ID NO: 1334 - RNA, 21 nt, Artificial Sequence
  source: /note="Description of Artificial Sequence: Synthetic oligonucleotide"
uagaagggcaugaagcagguu

SEQ ID NO: 1335 - RNA, 21 nt, Artificial Sequence
  source: /note="Description of Artificial Sequence: Synthetic oligonucleotide"
augcccuucuacaguggccuu

SEQ ID NO: 1336 - RNA, 21 nt, Artificial Sequence
  source: /note="Description of Artificial Sequence: Synthetic oligonucleotide"
ggccacuguagaagggcauuu

SEQ ID NO: 1337 - RNA, 21 nt, Artificial Sequence
  source: /note="Description of Artificial Sequence: Synthetic oligonucleotide"
auggcuuccagauaugccuuu

SEQ ID NO: 1338 - RNA, 21 nt, Artificial Sequence
  source: /note="Description of Artificial Sequence: Synthetic oligonucleotide"
aggcauaucuggaagccauuu

SEQ ID NO: 1339 - RNA, 21 nt, Artificial Sequence
  source: /note="Description of Artificial Sequence: Synthetic oligonucleotide"
gugacaacguacccuucauuu

SEQ ID NO: 1340 - RNA, 21 nt, Artificial Sequence
  source: /note="Description of Artificial Sequence: Synthetic oligonucleotide"
augaaggguacguugucacuu

SEQ ID NO: 1341 - RNA, 21 nt, Artificial Sequence
  source: /note="Description of Artificial Sequence: Synthetic oligonucleotide"
guauguuccugcuucaugcuu

SEQ ID NO: 1342 - RNA, 21 nt, Artificial Sequence
  source: /note="Description of Artificial Sequence: Synthetic oligonucleotide"
gcaugaagcaggaacauacuu

SEQ ID NO: 1343 - RNA, 21 nt, Artificial Sequence
  source: /note="Description of Artificial Sequence: Synthetic oligonucleotide"
guauguuccugcuucaugcuu

SEQ ID NO: 1344 - RNA, 21 nt, Artificial Sequence
  source: /note="Description of Artificial Sequence: Synthetic oligonucleotide"
gcaugaagcaggaacauacuu

SEQ ID NO: 1345 - RNA, 21 nt, Artificial Sequence
  source: /note="Description of Artificial Sequence: Synthetic oligonucleotide"
guauguuccugcuucaugcuu

SEQ ID NO: 1346 - RNA, 21 nt, Artificial Sequence
  source: /note="Description of Artificial Sequence: Synthetic oligonucleotide"
gcaugaagcaggaacauacuu

SEQ ID NO: 1347 - RNA, 21 nt, Artificial Sequence
  source: /note="Description of Artificial Sequence: Synthetic oligonucleotide"
guauguuccugcuucaugccu

SEQ ID NO: 1348 - RNA, 23 nt, Artificial Sequence
  source: /note="Description of Artificial Sequence: Synthetic oligonucleotide"
aggcaugaagcaggaacauacuu

SEQ ID NO: 1349 - RNA, 21 nt, Artificial Sequence
  source: /note="Description of Artificial Sequence: Synthetic oligonucleotide"
ugguauguuccugcuucaugu

SEQ ID NO: 1350 - RNA, 23 nt, Artificial Sequence
  source: /note="Description of Artificial Sequence: Synthetic oligonucleotide"
gcaugaagcaggaacauaccauu

SEQ ID NO: 1351 - RNA, 19 nt, Artificial Sequence
  source: /note="Description of Artificial Sequence: Synthetic oligonucleotide"
guauguuccugcuucaugu

SEQ ID NO: 1352 - RNA, 21 nt, Artificial Sequence
  source: /note="Description of Artificial Sequence: Synthetic oligonucleotide"
gcaugaagcaggaacauacuu

SEQ ID NO: 1353 - RNA, 20 nt, Artificial Sequence
  source: /note="Description of Artificial Sequence: Synthetic oligonucleotide"
  modified_base (20)..(20): Inverted abasic nucleotide
guauguuccugcuucaugcn

SEQ ID NO: 1354 - RNA, 21 nt, Artificial Sequence
  source: /note="Description of Artificial Sequence: Synthetic oligonucleotide"
gcaugaagcaggaacauacuu

SEQ ID NO: 1355 - RNA, 21 nt, Artificial Sequence
  source: /note="Description of Artificial Sequence: Synthetic oligonucleotide"
gcuucaugcccuucuacauuu

SEQ ID NO: 1356 - RNA, 21 nt, Artificial Sequence
  source: /note="Description of Artificial Sequence: Synthetic oligonucleotide"
auguagaagggcaugaagcuu

SEQ ID NO: 1357 - RNA, 21 nt, Artificial Sequence
  source: /note="Description of Artificial Sequence: Synthetic oligonucleotide"
gcuucaugcccuucuacauuu

SEQ ID NO: 1358 - RNA, 21 nt, Artificial Sequence
  source: /note="Description of Artificial Sequence: Synthetic oligonucleotide"
auguagaagggcaugaagcuu

SEQ ID NO: 1359 - RNA, 21 nt, Artificial Sequence
  source: /note="Description of Artificial Sequence: Synthetic oligonucleotide"
gcuucaugcccuucuacauuu

SEQ ID NO: 1360 - RNA, 21 nt, Artificial Sequence
  source: /note="Description of Artificial Sequence: Synthetic oligonucleotide"
auguagaagggcaugaagcuu

SEQ ID NO: 1361 - RNA, 21 nt, Artificial Sequence
  source: /note="Description of Artificial Sequence: Synthetic oligonucleotide"
gcuucaugcccuucuacauuu

SEQ ID NO: 1362 - RNA, 21 nt, Artificial Sequence
  source: /note="Description of Artificial Sequence: Synthetic oligonucleotide"
auguagaagggcaugaagcuu

SEQ ID NO: 1363 - RNA, 21 nt, Artificial Sequence
  source: /note="Description of Artificial Sequence: Synthetic oligonucleotide"
gcuucaugcccuucuacauuu

SEQ ID NO: 1364 - RNA, 21 nt, Artificial Sequence
  source: /note="Description of Artificial Sequence: Synthetic oligonucleotide"
auguagaagggcaugaagcuu

SEQ ID NO: 1365 - RNA, 21 nt, Artificial Sequence
  source: /note="Description of Artificial Sequence: Synthetic oligonucleotide"
gcuucaugcccuucuacauuu

SEQ ID NO: 1366 - RNA, 21 nt, Artificial Sequence
  source: /note="Description of Artificial Sequence: Synthetic oligonucleotide"
auguagaagggcaugaagcuu

SEQ ID NO: 1367 - RNA, 21 nt, Artificial Sequence
  source: /note="Description of Artificial Sequence: Synthetic oligonucleotide"
gcuucaugcccuucuacauuu

SEQ ID NO: 1368 - RNA, 21 nt, Artificial Sequence
  source: /note="Description of Artificial Sequence: Synthetic oligonucleotide"
auguagaagggcaugaagcuu

SEQ ID NO: 1369 - RNA, 21 nt, Artificial Sequence
  source: /note="Description of Artificial Sequence: Synthetic oligonucleotide"
gcuucaugcccuucuacauuu

SEQ ID NO: 1370 - RNA, 21 nt, Artificial Sequence
  source: /note="Description of Artificial Sequence: Synthetic oligonucleotide"
auguagaagggcaugaagcuu

SEQ ID NO: 1371 - RNA, 21 nt, Artificial Sequence
  source: /note="Description of Artificial Sequence: Synthetic oligonucleotide"
gcuucaugcccuucuacauuu

SEQ ID NO: 1372 - RNA, 21 nt, Artificial Sequence
  source: /note="Description of Artificial Sequence: Synthetic oligonucleotide"
auguagaagggcaugaagcuu

SEQ ID NO: 1373 - RNA, 21 nt, Artificial Sequence
  source: /note="Description of Artificial Sequence: Synthetic oligonucleotide"
gcuucaugcccuucuacauuu

SEQ ID NO: 1374 - RNA, 21 nt, Artificial Sequence
  source: /note="Description of Artificial Sequence: Synthetic oligonucleotide"
auguagaagggcaugaagcuu

SEQ ID NO: 1375 - RNA, 21 nt, Artificial Sequence
  source: /note="Description of Artificial Sequence: Synthetic oligonucleotide"
gcuucaugcccuucuacauuu

SEQ ID NO: 1376 - RNA, 21 nt, Artificial Sequence
  source: /note="Description of Artificial Sequence: Synthetic oligonucleotide"
auguagaagggcaugaagcuu

SEQ ID NO: 1377 - RNA, 21 nt, Artificial Sequence
  source: /note="Description of Artificial Sequence: Synthetic oligonucleotide"
gcuucaugcccuucuacauuu

SEQ ID NO: 1378 - RNA, 21 nt, Artificial Sequence
  source: /note="Description of Artificial Sequence: Synthetic oligonucleotide"
auguagaagggcaugaagcuu

SEQ ID NO: 1379 - RNA, 21 nt, Artificial Sequence
  source: /note="Description of Artificial Sequence: Synthetic oligonucleotide"
gcuucaugcccuucuacauuu

SEQ ID NO: 1380 - RNA, 21 nt, Artificial Sequence
  source: /note="Description of Artificial Sequence: Synthetic oligonucleotide"
auguagaagggcaugaagcuu

SEQ ID NO: 1381 - RNA, 21 nt, Artificial Sequence
  source: /note="Description of Artificial Sequence: Synthetic oligonucleotide"
gcuucaugcccuucuacauuu

SEQ ID NO: 1382 - RNA, 21 nt, Artificial Sequence
  source: /note="Description of Artificial Sequence: Synthetic oligonucleotide"
auguagaagggcaugaagcuu

SEQ ID NO: 1383 - RNA, 21 nt, Artificial Sequence
  source: /note="Description of Artificial Sequence: Synthetic oligonucleotide"
gcuucaugcccuucuacauuu

SEQ ID NO: 1384 - RNA, 21 nt, Artificial Sequence
  source: /note="Description of Artificial Sequence: Synthetic oligonucleotide"
auguagaagggcaugaagcuu

SEQ ID NO: 1385 - RNA, 21 nt, Artificial Sequence
  source: /note="Description of Artificial Sequence: Synthetic oligonucleotide"
gcuucaugcccuucuacauuu

SEQ ID NO: 1386 - RNA, 21 nt, Artificial Sequence
  source: /note="Description of Artificial Sequence: Synthetic oligonucleotide"
auguagaagggcaugaagcuu

SEQ ID NO: 1387 - DNA, 21 bp, Artificial Sequence
  source: /note="Description of Artificial Sequence: Synthetic oligonucleotide"
  source: /note="Description of Combined DNA/RNA Molecule: Synthetic oligonucleotide"
gcuucaugcccuucuacauuu

SEQ ID NO: 1388 - RNA, 21 nt, Artificial Sequence
  source: /note="Description of Artificial Sequence: Synthetic oligonucleotide"
auguagaagggcaugaagcuu

SEQ ID NO: 1389 - DNA, 21 bp, Artificial Sequence
  source: /note="Description of Artificial Sequence: Synthetic oligonucleotide"
  source: /note="Description of Combined DNA/RNA Molecule: Synthetic oligonucleotide"
gcuucaugcccuucuacauuu

SEQ ID NO: 1390 - RNA, 21 nt, Artificial Sequence
  source: /note="Description of Artificial Sequence: Synthetic oligonucleotide"
auguagaagggcaugaagcuu

SEQ ID NO: 1391 - DNA, 21 bp, Artificial Sequence
  source: /note="Description of Artificial Sequence: Synthetic oligonucleotide"
  source: /note="Description of Combined DNA/RNA Molecule: Synthetic oligonucleotide"
gcuucaugcccuucuacauuu

SEQ ID NO: 1392 - RNA, 21 nt, Artificial Sequence
  source: /note="Description of Artificial Sequence: Synthetic oligonucleotide"
auguagaagggcaugaagcuu

SEQ ID NO: 1393 - RNA, 21 nt, Artificial Sequence
  source: /note="Description of Artificial Sequence: Synthetic oligonucleotide"
gcuucaugcccuucuacauuu

SEQ ID NO: 1394 - RNA, 21 nt, Artificial Sequence
  source: /note="Description of Artificial Sequence: Synthetic oligonucleotide"
auguagaagggcaugaagcuu

SEQ ID NO: 1395 - RNA, 21 nt, Artificial Sequence
  source: /note="Description of Artificial Sequence: Synthetic oligonucleotide"
gcuucaugcccuucuacauuu

SEQ ID NO: 1396 - RNA, 21 nt, Artificial Sequence
  source: /note="Description of Artificial Sequence: Synthetic oligonucleotide"
auguagaagggcaugaagcuu

SEQ ID NO: 1397 - RNA, 21 nt, Artificial Sequence
  source: /note="Description of Artificial Sequence: Synthetic oligonucleotide"
gcuucaugcccuucuacauuu

SEQ ID NO: 1398 - RNA, 21 nt, Artificial Sequence
  source: /note="Description of Artificial Sequence: Synthetic oligonucleotide"
auguagaagggcaugaagcuu

SEQ ID NO: 1399 - RNA, 21 nt, Artificial Sequence
  source: /note="Description of Artificial Sequence: Synthetic oligonucleotide"
gcuucaugcccuucuacauuu

SEQ ID NO: 1400 - RNA, 21 nt, Artificial Sequence
  source: /note="Description of Artificial Sequence: Synthetic oligonucleotide"
auguagaagggcaugaagcuu

SEQ ID NO: 1401 - RNA, 21 nt, Artificial Sequence
  source: /note="Description of Artificial Sequence: Synthetic oligonucleotide"
gcuucaugcccuucuacauuu

SEQ ID NO: 1402 - RNA, 21 nt, Artificial Sequence
  source: /note="Description of Artificial Sequence: Synthetic oligonucleotide"
auguagaagggcaugaagcuu

SEQ ID NO: 1403 - RNA, 21 nt, Artificial Sequence
  source: /note="Description of Artificial Sequence: Synthetic oligonucleotide"
gcuucaugcccuucuacaguu

SEQ ID NO: 1404 - RNA, 23 nt, Artificial Sequence
  source: /note="Description of Artificial Sequence: Synthetic oligonucleotide"
aacuguagaagggcaugaagcuu

SEQ ID NO: 1405 - RNA, 21 nt, Artificial Sequence
  source: /note="Description of Artificial Sequence: Synthetic oligonucleotide"
cugcuucaugcccuucuacau

SEQ ID NO: 1406 - RNA, 23 nt, Artificial Sequence
  source: /note="Description of Artificial Sequence: Synthetic oligonucleotide"
auguagaagggcaugaagcaguu

SEQ ID NO: 1407 - RNA, 19 nt, Artificial Sequence
  source: /note="Description of Artificial Sequence: Synthetic oligonucleotide"
gcuucaugcccuucuacau

SEQ ID NO: 1408 - RNA, 21 nt, Artificial Sequence
  source: /note="Description of Artificial Sequence: Synthetic oligonucleotide"
auguagaagggcaugaagcuu

SEQ ID NO: 1409 - RNA, 20 nt, Artificial Sequence
  source: /note="Description of Artificial Sequence: Synthetic oligonucleotide"
  modified_base (20)..(20): Inverted abasic nucleotide
gcuucaugcccuucuacaun

SEQ ID NO: 1410 - RNA, 21 nt, Artificial Sequence
  source: /note="Description of Artificial Sequence: Synthetic oligonucleotide"
auguagaagggcaugaagcuu

SEQ ID NO: 1411 - RNA, 22 nt, Artificial Sequence
  source: /note="Description of Artificial Sequence: Synthetic oligonucleotide"
  modified_base (22)..(22): Inverted abasic nucleotide
gcuucaugcccuucuacauuun

SEQ ID NO: 1412 - RNA, 21 nt, Artificial Sequence
  source: /note="Description of Artificial Sequence: Synthetic oligonucleotide"
auguagaagggcaugaagcuu

SEQ ID NO: 1413 - RNA, 21 nt, Artificial Sequence
  source: /note="Description of Artificial Sequence: Synthetic oligonucleotide"
gcuucaugcccuucuacauuu

SEQ ID NO: 1414 - RNA, 21 nt, Artificial Sequence
  source: /note="Description of Artificial Sequence: Synthetic oligonucleotide"
auguagaagggcaugaagcuu

SEQ ID NO: 1415 - RNA, 21 nt, Artificial Sequence
  source: /note="Description of Artificial Sequence: Synthetic oligonucleotide"
gcuucaugcccuucuacauuu

SEQ ID NO: 1416 - RNA, 21 nt, Artificial Sequence
  source: /note="Description of Artificial Sequence: Synthetic oligonucleotide"
auguagaagggcaugaagcuu

SEQ ID NO: 1417 - RNA, 21 nt, Artificial Sequence
  source: /note="Description of Artificial Sequence: Synthetic oligonucleotide"
gcuucaugcccuucuacauuu

SEQ ID NO: 1418 - RNA, 21 nt, Artificial Sequence
  source: /note="Description of Artificial Sequence: Synthetic oligonucleotide"
auguagaagggcaugaagcuu

SEQ ID NO: 1419 - RNA, 21 nt, Artificial Sequence
  source: /note="Description of Artificial Sequence: Synthetic oligonucleotide"
gcuucaugcccuucuacauuu

SEQ ID NO: 1420 - RNA, 21 nt, Artificial Sequence
  source: /note="Description of Artificial Sequence: Synthetic oligonucleotide"
auguagaagggcaugaagcuu

SEQ ID NO: 1421 - RNA, 21 nt, Artificial Sequence
  source: /note="Description of Artificial Sequence: Synthetic oligonucleotide"
gcuucaugcccuucuacauuu

SEQ ID NO: 1422 - RNA, 21 nt, Artificial Sequence
  source: /note="Description of Artificial Sequence: Synthetic oligonucleotide"
auguagaagggcaugaagcuu

SEQ ID NO: 1423 - RNA, 21 nt, Artificial Sequence
  source: /note="Description of Artificial Sequence: Synthetic oligonucleotide"
gcuucaugcccuucuacauuu

SEQ ID NO: 1424 - RNA, 21 nt, Artificial Sequence
  source: /note="Description of Artificial Sequence: Synthetic oligonucleotide"
auguagaagggcaugaagcuu

SEQ ID NO: 1425 - RNA, 21 nt, Artificial Sequence
  source: /note="Description of Artificial Sequence: Synthetic oligonucleotide"
gcuucaugcccuucuacauuu

SEQ ID NO: 1426 - RNA, 21 nt, Artificial Sequence
  source: /note="Description of Artificial Sequence: Synthetic oligonucleotide"
auguagaagggcaugaagcuu

SEQ ID NO: 1427 - RNA, 21 nt, Artificial Sequence
  source: /note="Description of Artificial Sequence: Synthetic oligonucleotide"
gcuucaugcccuucuacauuu

SEQ ID NO: 1428 - RNA, 21 nt, Artificial Sequence
  source: /note="Description of Artificial Sequence: Synthetic oligonucleotide"
auguagaagggcaugaagcuu

SEQ ID NO: 1429 - RNA, 21 nt, Artificial Sequence
  source: /note="Description of Artificial Sequence: Synthetic oligonucleotide"
gcuucaugcccuucuacauuu

SEQ ID NO: 1430 - RNA, 21 nt, Artificial Sequence
  source: /note="Description of Artificial Sequence: Synthetic oligonucleotide"
auguagaagggcaugaagcuu

SEQ ID NO: 1431 - RNA, 22 nt, Artificial Sequence
  source: /note="Description of Artificial Sequence: Synthetic oligonucleotide"
  modified_base (22)..(22): Inverted abasic nucleotide
guauguuccugcuucaugcuun

SEQ ID NO: 1432 - RNA, 21 nt, Artificial Sequence
  source: /note="Description of Artificial Sequence: Synthetic oligonucleotide"
gcaugaagcaggaacauacuu

SEQ ID NO: 1433 - RNA, 21 nt, Artificial Sequence
  source: /note="Description of Artificial Sequence: Synthetic oligonucleotide"
gguauguuccugcuucauuuu

SEQ ID NO: 1434 - RNA, 21 nt, Artificial Sequence
  source: /note="Description of Artificial Sequence: Synthetic oligonucleotide"
aaugaagcaggaacauaccuu

SEQ ID NO: 1435 - RNA, 21 nt, Artificial Sequence
  source: /note="Description of Artificial Sequence: Synthetic oligonucleotide"
guauguuccugcuucauguuu

SEQ ID NO: 1436 - RNA, 21 nt, Artificial Sequence
  source: /note="Description of Artificial Sequence: Synthetic oligonucleotide"
acaugaagcaggaacauacuu

SEQ ID NO: 1437 - RNA, 21 nt, Artificial Sequence
  source: /note="Description of Artificial Sequence: Synthetic oligonucleotide"
cggccaauguccaccagcuuu

SEQ ID NO: 1438 - RNA, 21 nt, Artificial Sequence
  source: /note="Description of Artificial Sequence: Synthetic oligonucleotide"
agcugguggacauuggccguu

SEQ ID NO: 1439 - RNA, 21 nt, Artificial Sequence
  source: /note="Description of Artificial Sequence: Synthetic oligonucleotide"
uggagcagacucugcagguuu

SEQ ID NO: 1440 - RNA, 21 nt, Artificial Sequence
  source: /note="Description of Artificial Sequence: Synthetic oligonucleotide"
accugcagagucugcuccauu

SEQ ID NO: 1441 - RNA, 21 nt, Artificial Sequence
  source: /note="Description of Artificial Sequence: Synthetic oligonucleotide"
acguacccuucauugauguuu

SEQ ID NO: 1442 - RNA, 21 nt, Artificial Sequence
  source: /note="Description of Artificial Sequence: Synthetic oligonucleotide"
acaucaaugaaggguacguuu

SEQ ID NO: 1443 - RNA, 21 nt, Artificial Sequence
  source: /note="Description of Artificial Sequence: Synthetic oligonucleotide"
ccagagacuggugacauguuu

SEQ ID NO: 1444 - RNA, 21 nt, Artificial Sequence
  source: /note="Description of Artificial Sequence: Synthetic oligonucleotide"
acaugucaccagucucugguu

SEQ ID NO: 1445 - RNA, 22 nt, Artificial Sequence
  source: /note="Description of Artificial Sequence: Synthetic oligonucleotide"
  modified_base (1)..(1): Inverted abasic nucleotide
ngcuucaugccuuucuacauuu

SEQ ID NO: 1446 - RNA, 21 nt, Artificial Sequence
  source: /note="Description of Artificial Sequence: Synthetic oligonucleotide"
auguagaaaggcaugaagcuu

SEQ ID NO: 1447 - RNA, 22 nt, Artificial Sequence
  source: /note="Description of Artificial Sequence: Synthetic oligonucleotide"
  modified_base (1)..(1): Inverted abasic nucleotide
ngcuucaugccuuucuacauuu

SEQ ID NO: 1448 - RNA, 23 nt, Artificial Sequence
  source: /note="Description of Artificial Sequence: Synthetic oligonucleotide"
aaauguagaaaggcaugaagcuu

SEQ ID NO: 1449 - RNA, 22 nt, Artificial Sequence
  source: /note="Description of Artificial Sequence: Synthetic oligonucleotide"
  modified_base (1)..(1): Inverted abasic nucleotide
ngcuucaugccuuucuacauuu

SEQ ID NO: 1450 - RNA, 23 nt, Artificial Sequence
  source: /note="Description of Artificial Sequence: Synthetic oligonucleotide"
aaauguagaaaggcaugaagcuu

SEQ ID NO: 1451 - RNA, 21 nt, Artificial Sequence
  source: /note="Description of Artificial Sequence: Synthetic oligonucleotide"
ugcuucaugccuuucuacauu

SEQ ID NO: 1452 - RNA, 21 nt, Artificial Sequence
  source: /note="Description of Artificial Sequence: Synthetic oligonucleotide"
uguagaaaggcaugaagcauu

SEQ ID NO: 1453 - RNA, 21 nt, Artificial Sequence
  source: /note="Description of Artificial Sequence: Synthetic oligonucleotide"
uauguuccugcuucaugcuuu

SEQ ID NO: 1454 - RNA, 21 nt, Artificial Sequence
  source: /note="Description of Artificial Sequence: Synthetic oligonucleotide"
agcaugaagcaggaacauauu

SEQ ID NO: 1455 - RNA, 21 nt, Artificial Sequence
  source: /note="Description of Artificial Sequence: Synthetic oligonucleotide"
uuccugcuucaugccuuuuuu

SEQ ID NO: 1456 - RNA, 21 nt, Artificial Sequence
  source: /note="Description of Artificial Sequence: Synthetic oligonucleotide"
aaaaggcaugaagcaggaauu

SEQ ID NO: 1457 - RNA, 21 nt, Artificial Sequence
  source: /note="Description of Artificial Sequence: Synthetic oligonucleotide"
ucaugccuuucuacaguguuu

SEQ ID NO: 1458 - RNA, 21 nt, Artificial Sequence
  source: /note="Description of Artificial Sequence: Synthetic oligonucleotide"
acacuguagaaaggcaugauu

SEQ ID NO: 1459 - RNA, 21 nt, Artificial Sequence
  source: /note="Description of Artificial Sequence: Synthetic oligonucleotide"
caugccuuucuacagugguuu

SEQ ID NO: 1460 - RNA, 21 nt, Artificial Sequence
  source: /note="Description of Artificial Sequence: Synthetic oligonucleotide"
accacuguagaaaggcauguu

SEQ ID NO: 1461 - RNA, 21 nt, Artificial Sequence
  source: /note="Description of Artificial Sequence: Synthetic oligonucleotide"
augccuuucuacaguggcuuu

SEQ ID NO: 1462 - RNA, 21 nt, Artificial Sequence
  source: /note="Description of Artificial Sequence: Synthetic oligonucleotide"
agccacuguagaaaggcauuu

SEQ ID NO: 1463 - RNA, 21 nt, Artificial Sequence
  source: /note="Description of Artificial Sequence: Synthetic oligonucleotide"
gguauguuccugcuucauauu

SEQ ID NO: 1464 - RNA, 21 nt, Artificial Sequence
  source: /note="Description of Artificial Sequence: Synthetic oligonucleotide"
uaugaagcaggaacauaccuu

SEQ ID NO: 1465 - RNA, 21 nt, Artificial Sequence
  source: /note="Description of Artificial Sequence: Synthetic oligonucleotide"
guauguuccugcuucaugauu

SEQ ID NO: 1466 - RNA, 21 nt, Artificial Sequence
  source: /note="Description of Artificial Sequence: Synthetic oligonucleotide"
ucaugaagcaggaacauacuu

SEQ ID NO: 1467 - RNA, 21 nt, Artificial Sequence
  source: /note="Description of Artificial Sequence: Synthetic oligonucleotide"
uauguuccugcuucaugcauu

SEQ ID NO: 1468 - RNA, 21 nt, Artificial Sequence
  source: /note="Description of Artificial Sequence: Synthetic oligonucleotide"
ugcaugaagcaggaacauauu

SEQ ID NO: 1469 - RNA, 21 nt, Artificial Sequence
  source: /note="Description of Artificial Sequence: Synthetic oligonucleotide"
uuccugcuucaugccuuuauu

SEQ ID NO: 1470 - RNA, 21 nt, Artificial Sequence
  source: /note="Description of Artificial Sequence: Synthetic oligonucleotide"
uaaaggcaugaagcaggaauu

SEQ ID NO: 1471 - RNA, 21 nt, Artificial Sequence
  source: /note="Description of Artificial Sequence: Synthetic oligonucleotide"
cugcuucaugccuuucuaauu

SEQ ID NO: 1472 - RNA, 21 nt, Artificial Sequence
  source: /note="Description of Artificial Sequence: Synthetic oligonucleotide"
uuagaaaggcaugaagcaguu

SEQ ID NO: 1473 - RNA, 21 nt, Artificial Sequence
  source: /note="Description of Artificial Sequence: Synthetic oligonucleotide"
gcuucaugccuuucuacaauu

SEQ ID NO: 1474 - RNA, 21 nt, Artificial Sequence
  source: /note="Description of Artificial Sequence: Synthetic oligonucleotide"
uuguagaaaggcaugaagcuu

SEQ ID NO: 1475 - RNA, 21 nt, Artificial Sequence
  source: /note="Description of Artificial Sequence: Synthetic oligonucleotide"
uucaugccuuucuacaguauu

SEQ ID NO: 1476 - RNA, 21 nt, Artificial Sequence
  source: /note="Description of Artificial Sequence: Synthetic oligonucleotide"
uacuguagaaaggcaugaauu

SEQ ID NO: 1477 - RNA, 21 nt, Artificial Sequence
  source: /note="Description of Artificial Sequence: Synthetic oligonucleotide"
ucaugccuuucuacagugauu

SEQ ID NO: 1478 - RNA, 21 nt, Artificial Sequence
  source: /note="Description of Artificial Sequence: Synthetic oligonucleotide"
ucacuguagaaaggcaugauu

SEQ ID NO: 1479 - RNA, 21 nt, Artificial Sequence
  source: /note="Description of Artificial Sequence: Synthetic oligonucleotide"
caugccuuucuacaguggauu

SEQ ID NO: 1480 - RNA, 21 nt, Artificial Sequence
  source: /note="Description of Artificial Sequence: Synthetic oligonucleotide"
uccacuguagaaaggcauguu

SEQ ID NO: 1481 - RNA, 21 nt, Artificial Sequence
  source: /note="Description of Artificial Sequence: Synthetic oligonucleotide"
augccuuucuacaguggcauu

SEQ ID NO: 1482 - RNA, 21 nt, Artificial Sequence
  source: /note="Description of Artificial Sequence: Synthetic oligonucleotide"
ugccacuguagaaaggcauuu

SEQ ID NO: 1483 - RNA, 21 nt, Artificial Sequence
  source: /note="Description of Artificial Sequence: Synthetic oligonucleotide"
acguacccuucauugaugauu

SEQ ID NO: 1484 - RNA, 21 nt, Artificial Sequence
  source: /note="Description of Artificial Sequence: Synthetic oligonucleotide"
ucaucaaugaaggguacguuu

SEQ ID NO: 1485 - RNA, 21 nt, Artificial Sequence
  source: /note="Description of Artificial Sequence: Synthetic oligonucleotide"
ccagagacuggugacaugauu

SEQ ID NO: 1486 - RNA, 21 nt, Artificial Sequence
  source: /note="Description of Artificial Sequence: Synthetic oligonucleotide"
ucaugucaccagucucugguu

SEQ ID NO: 1487 - RNA, 21 nt, Artificial Sequence
  source: /note="Description of Artificial Sequence: Synthetic oligonucleotide"
auggcuuccagauaugccauu

SEQ ID NO: 1488 - RNA, 21 nt, Artificial Sequence
  source: /note="Description of Artificial Sequence: Synthetic oligonucleotide"
uggcauaucuggaagccauuu

SEQ ID NO: 1489 - RNA, 21 nt, Artificial Sequence
  source: /note="Description of Artificial Sequence: Synthetic oligonucleotide"
guuccugcuucaugccuuuuu

SEQ ID NO: 1490 - RNA, 21 nt, Artificial Sequence
  source: /note="Description of Artificial Sequence: Synthetic oligonucleotide"
aaaggcaugaagcaggaacuu

SEQ ID NO: 1491 - RNA, 21 nt, Artificial Sequence
  source: /note="Description of Artificial Sequence: Synthetic oligonucleotide"
ccugcuucaugccuuucuauu

SEQ ID NO: 1492 - RNA, 21 nt, Artificial Sequence
  source: /note="Description of Artificial Sequence: Synthetic oligonucleotide"
uagaaaggcaugaagcagguu

SEQ ID NO: 1493 - RNA, 21 nt, Artificial Sequence
  source: /note="Description of Artificial Sequence: Synthetic oligonucleotide"
gcuucaugccuuucuacauuu

SEQ ID NO: 1494 - RNA, 21 nt, Artificial Sequence
  source: /note="Description of Artificial Sequence: Synthetic oligonucleotide"
auguagaaaggcaugaagcuu

SEQ ID NO: 1495 - RNA, 21 nt, Artificial Sequence
  source: /note="Description of Artificial Sequence: Synthetic oligonucleotide"
cuucaugccuuucuacaguuu

SEQ ID NO: 1496 - RNA, 21 nt, Artificial Sequence
  source: /note="Description of Artificial Sequence: Synthetic oligonucleotide"
acuguagaaaggcaugaaguu

SEQ ID NO: 1497 - RNA, 21 nt, Artificial Sequence
  source: /note="Description of Artificial Sequence: Synthetic oligonucleotide"
uucaugccuuucuacaguuuu

SEQ ID NO: 1498 - RNA, 21 nt, Artificial Sequence
  source: /note="Description of Artificial Sequence: Synthetic oligonucleotide"
aacuguagaaaggcaugaauu

SEQ ID NO: 1499 - RNA, 21 nt, Artificial Sequence
  source: /note="Description of Artificial Sequence: Synthetic oligonucleotide"
gcuucaucccuuucuacauuu

SEQ ID NO: 1500 - RNA, 21 nt, Artificial Sequence
  source: /note="Description of Artificial Sequence: Synthetic oligonucleotide"
auguagaaagggaugaagcuu

SEQ ID NO: 1501 - RNA, 22 nt, Artificial Sequence
  source: /note="Description of Artificial Sequence: Synthetic oligonucleotide"
  modified_base (1)..(1): Inverted abasic nucleotide
ngcuucaugcccuucuacauuu

SEQ ID NO: 1502 - RNA, 21 nt, Artificial Sequence
  source: /note="Description of Artificial Sequence: Synthetic oligonucleotide"
auguagaagggcaugaagcuu

SEQ ID NO: 1503 - RNA, 22 nt, Artificial Sequence
  source: /note="Description of Artificial Sequence: Synthetic oligonucleotide"
  modified_base (1)..(1): Inverted abasic nucleotide
ngcuucaugcccuucuacauuu

SEQ ID NO: 1504 - RNA, 23 nt, Artificial Sequence
  source: /note="Description of Artificial Sequence: Synthetic oligonucleotide"
aaauguagaagggcaugaagcuu

SEQ ID NO: 1505 - RNA, 22 nt, Artificial Sequence
  source: /note="Description of Artificial Sequence: Synthetic oligonucleotide"
  modified_base (1)..(1): Inverted abasic nucleotide
ngcuucaugcccuucuacauuu

SEQ ID NO: 1506 - RNA, 23 nt, Artificial Sequence
  source: /note="Description of Artificial Sequence: Synthetic oligonucleotide"
aaauguagaagggcaugaagcuu

SEQ ID NO: 1507 - RNA, 22 nt, Artificial Sequence
  source: /note="Description of Artificial Sequence: Synthetic oligonucleotide"
  modified_base (1)..(1): Inverted abasic nucleotide
ngcggcuuccugggcuucuauu

SEQ ID NO: 1508 - RNA, 21 nt, Artificial Sequence
  source: /note="Description of Artificial Sequence: Synthetic oligonucleotide"
uagaagcccaggaagccgcuu

SEQ ID NO: 1509 - RNA, 22 nt, Artificial Sequence
  source: /note="Description of Artificial Sequence: Synthetic oligonucleotide"
  modified_base (1)..(1): Inverted abasic nucleotide
ncugcggcuuccugggcuucua

SEQ ID NO: 1510 - RNA, 23 nt, Artificial Sequence
  source: /note="Description of Artificial Sequence: Synthetic oligonucleotide"
uagaagcccaggaagccgcaguu

SEQ ID NO: 1511 - RNA, 21 nt, Artificial Sequence
  source: /note="Description of Artificial Sequence: Synthetic oligonucleotide"
  modified_base (21)..(21): Inverted abasic nucleotide
cugcggcuuccugggcuucun

SEQ ID NO: 1512 - RNA, 23 nt, Artificial Sequence
  source: /note="Description of Artificial Sequence: Synthetic oligonucleotide"
uagaagcccaggaagccgcaguu

SEQ ID NO: 1513 - RNA, 22 nt, Artificial Sequence
  source: /note="Description of Artificial Sequence: Synthetic oligonucleotide"
  modified_base (1)..(1): Inverted abasic nucleotide
ncugcggcuuccugggcuucua

SEQ ID NO: 1514 - RNA, 23 nt, Artificial Sequence
  source: /note="Description of Artificial Sequence: Synthetic oligonucleotide"
uagaagcccaggaagccgcaguu

SEQ ID NO: 1515 - RNA, 22 nt, Artificial Sequence
  source: /note="Description of Artificial Sequence: Synthetic oligonucleotide"
  modified_base (1)..(1): Inverted abasic nucleotide
ngcggcuuccugggcuucuauu

SEQ ID NO: 1516 - RNA, 21 nt, Artificial Sequence
  source: /note="Description of Artificial Sequence: Synthetic oligonucleotide"
uagaagcccaggaagccgcuu

SEQ ID NO: 1517 - RNA, 21 nt, Artificial Sequence
  source: /note="Description of Artificial Sequence: Synthetic oligonucleotide"
  modified_base (21)..(21): Inverted abasic nucleotide
cugcggcuuccugggcuucun

SEQ ID NO: 1518 - RNA, 23 nt, Artificial Sequence
  source: /note="Description of Artificial Sequence: Synthetic oligonucleotide"
uagaagcccaggaagccgcaguu

SEQ ID NO: 1519 - RNA, 22 nt, Artificial Sequence
  source: /note="Description of Artificial Sequence: Synthetic oligonucleotide"
  modified_base (1)..(1): Inverted abasic nucleotide
ncugcggcuuccugggcuucua

SEQ ID NO: 1520 - RNA, 23 nt, Artificial Sequence
  source: /note="Description of Artificial Sequence: Synthetic oligonucleotide"
uagaagcccaggaagccgcaguu

SEQ ID NO: 1521 - RNA, 22 nt, Artificial Sequence
  source: /note="Description of Artificial Sequence: Synthetic oligonucleotide"
  modified_base (1)..(1): Inverted abasic nucleotide
ngcggcuuccugggcuucuauu

SEQ ID NO: 1522 - RNA, 21 nt, Artificial Sequence
  source: /note="Description of Artificial Sequence: Synthetic oligonucleotide"
uagaagcccaggaagccgcuu

SEQ ID NO: 1523 - RNA, 21 nt, Artificial Sequence
  source: /note="Description of Artificial Sequence: Synthetic oligonucleotide"
  modified_base (21)..(21): Inverted abasic nucleotide
cugcggcuuccugggcuucun

SEQ ID NO: 1524 - RNA, 23 nt, Artificial Sequence
  source: /note="Description of Artificial Sequence: Synthetic oligonucleotide"
uagaagcccaggaagccgcaguu

SEQ ID NO: 1525 - RNA, 22 nt, Artificial Sequence
  source: /note="Description of Artificial Sequence: Synthetic oligonucleotide"
  modified_base (1)..(1): Inverted abasic nucleotide
ncugcggcuuccugggcuucua

SEQ ID NO: 1526 - RNA, 23 nt, Artificial Sequence
  source: /note="Description of Artificial Sequence: Synthetic oligonucleotide"
uagaagcccaggaagccgcaguu

SEQ ID NO: 1527 - RNA, 22 nt, Artificial Sequence
  source: /note="Description of Artificial Sequence: Synthetic oligonucleotide"
  modified_base (1)..(1): Inverted abasic nucleotide
ngcggcuuccugggcuucuauu

SEQ ID NO: 1528 - RNA, 21 nt, Artificial Sequence
  source: /note="Description of Artificial Sequence: Synthetic oligonucleotide"
uagaagcccaggaagccgcuu

SEQ ID NO: 1529 - RNA, 22 nt, Artificial Sequence
  source: /note="Description of Artificial Sequence: Synthetic oligonucleotide"
  modified_base (1)..(1): Inverted abasic nucleotide
ncugcggcuuccugggcuucua

SEQ ID NO: 1530 - RNA, 23 nt, Artificial Sequence
  source: /note="Description of Artificial Sequence: Synthetic oligonucleotide"
uagaagcccaggaagccgcaguu

SEQ ID NO: 1531 - RNA, 22 nt, Artificial Sequence
  source: /note="Description of Artificial Sequence: Synthetic oligonucleotide"
  modified_base (1)..(1): Inverted abasic nucleotide
ncugcggcuuccugggcuucua

SEQ ID NO: 1532 - RNA, 23 nt, Artificial Sequence
  source: /note="Description of Artificial Sequence: Synthetic oligonucleotide"
uagaagcccaggaagccgcaguu

SEQ ID NO: 1533 - RNA, 22 nt, Artificial Sequence
  source: /note="Description of Artificial Sequence: Synthetic oligonucleotide"
  modified_base (1)..(1): Inverted abasic nucleotide
ncugcggcuuccugggcuucua

SEQ ID NO: 1534 - RNA, 23 nt, Artificial Sequence
  source: /note="Description of Artificial Sequence: Synthetic oligonucleotide"
uagaagcccaggaagccgcaguu

SEQ ID NO: 1535 - RNA, 22 nt, Artificial Sequence
  source: /note="Description of Artificial Sequence: Synthetic oligonucleotide"
  modified_base (1)..(1): Inverted abasic nucleotide
nauggcuuccagauaugccuuu

SEQ ID NO: 1536 - RNA, 21 nt, Artificial Sequence
  source: /note="Description of Artificial Sequence: Synthetic oligonucleotide"
aggcauaucuggaagccauuu

SEQ ID NO: 1537 - RNA, 22 nt, Artificial Sequence
  source: /note="Description of Artificial Sequence: Synthetic oligonucleotide"
  modified_base (1)..(1): Inverted abasic nucleotide
nacauggcuuccagauaugccu

SEQ ID NO: 1538 - RNA, 23 nt, Artificial Sequence
  source: /note="Description of Artificial Sequence: Synthetic oligonucleotide"
aggcauaucuggaagccauguuu

SEQ ID NO: 1539 - RNA, 21 nt, Artificial Sequence
  source: /note="Description of Artificial Sequence: Synthetic oligonucleotide"
  modified_base (21)..(21): Inverted abasic nucleotide
acauggcuuccagauaugccn

SEQ ID NO: 1540 - RNA, 23 nt, Artificial Sequence
  source: /note="Description of Artificial Sequence: Synthetic oligonucleotide"
aggcauaucuggaagccauguuu

SEQ ID NO: 1541 - RNA, 22 nt, Artificial Sequence
  source: /note="Description of Artificial Sequence: Synthetic oligonucleotide"
  modified_base (1)..(1): Inverted abasic nucleotide
nacauggcuuccagauaugccu

SEQ ID NO: 1542 - RNA, 23 nt, Artificial Sequence
  source: /note="Description of Artificial Sequence: Synthetic oligonucleotide"
aggcauaucuggaagccauguuu

SEQ ID NO: 1543 - RNA, 22 nt, Artificial Sequence
  source: /note="Description of Artificial Sequence: Synthetic oligonucleotide"
  modified_base (1)..(1): Inverted abasic nucleotide
nauggcuuccagauaugccuuu

SEQ ID NO: 1544 - RNA, 21 nt, Artificial Sequence
  source: /note="Description of Artificial Sequence: Synthetic oligonucleotide"
aggcauaucuggaagccauuu

SEQ ID NO: 1545 - RNA, 21 nt, Artificial Sequence
  source: /note="Description of Artificial Sequence: Synthetic oligonucleotide"
  modified_base (21)..(21): Inverted abasic nucleotide
acauggcuuccagauaugccn

SEQ ID NO: 1546 - RNA, 23 nt, Artificial Sequence
  source: /note="Description of Artificial Sequence: Synthetic oligonucleotide"
aggcauaucuggaagccauguuu

SEQ ID NO: 1547 - RNA, 22 nt, Artificial Sequence
  source: /note="Description of Artificial Sequence: Synthetic oligonucleotide"
  modified_base (1)..(1): Inverted abasic nucleotide
nacauggcuuccagauaugccu

SEQ ID NO: 1548 - RNA, 23 nt, Artificial Sequence
  source: /note="Description of Artificial Sequence: Synthetic oligonucleotide"
aggcauaucuggaagccauguuu

SEQ ID NO: 1549 - RNA, 22 nt, Artificial Sequence
  source: /note="Description of Artificial Sequence: Synthetic oligonucleotide"
  modified_base (1)..(1): Inverted abasic nucleotide
nauggcuuccagauaugccuuu

SEQ ID NO: 1550 - RNA, 21 nt, Artificial Sequence
  source: /note="Description of Artificial Sequence: Synthetic oligonucleotide"
aggcauaucuggaagccauuu

SEQ ID NO: 1551 - RNA, 21 nt, Artificial Sequence
  source: /note="Description of Artificial Sequence: Synthetic oligonucleotide"
  modified_base (21)..(21): Inverted abasic nucleotide
acauggcuuccagauaugccn

SEQ ID NO: 1552 - RNA, 23 nt, Artificial Sequence
  source: /note="Description of Artificial Sequence: Synthetic oligonucleotide"
aggcauaucuggaagccauguuu

SEQ ID NO: 1553 - RNA, 22 nt, Artificial Sequence
  source: /note="Description of Artificial Sequence: Synthetic oligonucleotide"
  modified_base (1)..(1): Inverted abasic nucleotide
nacauggcuuccagauaugccu

SEQ ID NO: 1554 - RNA, 23 nt, Artificial Sequence
  source: /note="Description of Artificial Sequence: Synthetic oligonucleotide"
aggcauaucuggaagccauguuu

SEQ ID NO: 1555 - RNA, 22 nt, Artificial Sequence
  source: /note="Description of Artificial Sequence: Synthetic oligonucleotide"
  modified_base (1)..(1): Inverted abasic nucleotide
nauggcuuccagauaugccuuu

SEQ ID NO: 1556 - RNA, 21 nt, Artificial Sequence
  source: /note="Description of Artificial Sequence: Synthetic oligonucleotide"
aggcauaucuggaagccauuu

SEQ ID NO: 1557 - RNA, 21 nt, Artificial Sequence
  source: /note="Description of Artificial Sequence: Synthetic oligonucleotide"
  modified_base (21)..(21): Inverted abasic nucleotide
acauggcuuccagauaugccn

SEQ ID NO: 1558 - RNA, 23 nt, Artificial Sequence
  source: /note="Description of Artificial Sequence: Synthetic oligonucleotide"
aggcauaucuggaagccauguuu

SEQ ID NO: 1559 - RNA, 22 nt, Artificial Sequence
  source: /note="Description of Artificial Sequence: Synthetic oligonucleotide"
  modified_base (1)..(1): Inverted abasic nucleotide
nacauggcuuccagauaugccu

SEQ ID NO: 1560 - RNA, 23 nt, Artificial Sequence
  source: /note="Description of Artificial Sequence: Synthetic oligonucleotide"
aggcauaucuggaagccauguuu

SEQ ID NO: 1561 - RNA, 22 nt, Artificial Sequence
  source: /note="Description of Artificial Sequence: Synthetic oligonucleotide"
  modified_base (1)..(1): Inverted abasic nucleotide
nacauggcuuccagauaugccu

SEQ ID NO: 1562 - RNA, 23 nt, Artificial Sequence
  source: /note="Description of Artificial Sequence: Synthetic oligonucleotide"
aggcauaucuggaagccauguuu

SEQ ID NO: 1563 - RNA, 22 nt, Artificial Sequence
  source: /note="Description of Artificial Sequence: Synthetic oligonucleotide"
  modified_base (1)..(1): Inverted abasic nucleotide
nacauggcuuccagauaugccu

SEQ ID NO: 1564 - RNA, 23 nt, Artificial Sequence
  source: /note="Description of Artificial Sequence: Synthetic oligonucleotide"
aggcauaucuggaagccauguuu

SEQ ID NO: 1565 - RNA, 22 nt, Artificial Sequence
  source: /note="Description of Artificial Sequence: Synthetic oligonucleotide"
  modified_base (1)..(1): Inverted abasic nucleotide
nacauggcuuccagauaugccu

SEQ ID NO: 1566 - RNA, 23 nt, Artificial Sequence
  source: /note="Description of Artificial Sequence: Synthetic oligonucleotide"
aggcauaucuggaagccauguuu

SEQ ID NO: 1567 - RNA, 22 nt, Artificial Sequence
  source: /note="Description of Artificial Sequence: Synthetic oligonucleotide"
  modified_base (1)..(1): Inverted abasic nucleotide
nacguacccuucauugauguuu

SEQ ID NO: 1568 - RNA, 21 nt, Artificial Sequence
  source: /note="Description of Artificial Sequence: Synthetic oligonucleotide"
acaucaaugaaggguacguuu

SEQ ID NO: 1569 - RNA, 22 nt, Artificial Sequence
  source: /note="Description of Artificial Sequence: Synthetic oligonucleotide"
  modified_base (1)..(1): Inverted abasic nucleotide
ncaacguacccuucauugaugu

SEQ ID NO: 1570 - RNA, 23 nt, Artificial Sequence
  source: /note="Description of Artificial Sequence: Synthetic oligonucleotide"
acaucaaugaaggguacguuguu

SEQ ID NO: 1571 - RNA, 22 nt, Artificial Sequence
  source: /note="Description of Artificial Sequence: Synthetic oligonucleotide"
  modified_base (1)..(1): Inverted abasic nucleotide
ncaacguacccuucauugaugu

SEQ ID NO: 1572 - RNA, 23 nt, Artificial Sequence
  source: /note="Description of Artificial Sequence: Synthetic oligonucleotide"
acaucaaugaaggguacguuguu

SEQ ID NO: 1573 - RNA, 22 nt, Artificial Sequence
  source: /note="Description of Artificial Sequence: Synthetic oligonucleotide"
  modified_base (1)..(1): Inverted abasic nucleotide
nacguacccuucauugauguuu

SEQ ID NO: 1574 - RNA, 21 nt, Artificial Sequence
  source: /note="Description of Artificial Sequence: Synthetic oligonucleotide"
acaucaaugaaggguacguuu

SEQ ID NO: 1575 - RNA, 21 nt, Artificial Sequence
  source: /note="Description of Artificial Sequence: Synthetic oligonucleotide"
  modified_base (21)..(21): Inverted abasic nucleotide
caacguacccuucauugaugn

SEQ ID NO: 1576 - RNA, 23 nt, Artificial Sequence
  source: /note="Description of Artificial Sequence: Synthetic oligonucleotide"
acaucaaugaaggguacguuguu

SEQ ID NO: 1577 - RNA, 22 nt, Artificial Sequence
  source: /note="Description of Artificial Sequence: Synthetic oligonucleotide"
  modified_base (1)..(1): Inverted abasic nucleotide
nacguacccuucauugauguuu

SEQ ID NO: 1578 - RNA, 21 nt, Artificial Sequence
  source: /note="Description of Artificial Sequence: Synthetic oligonucleotide"
acaucaaugaaggguacguuu

SEQ ID NO: 1579 - RNA, 21 nt, Artificial Sequence
  source: /note="Description of Artificial Sequence: Synthetic oligonucleotide"
  modified_base (21)..(21): Inverted abasic nucleotide
caacguacccuucauugaugn

SEQ ID NO: 1580 - RNA, 23 nt, Artificial Sequence
  source: /note="Description of Artificial Sequence: Synthetic oligonucleotide"
acaucaaugaaggguacguuguu

SEQ ID NO: 1581 - RNA, 22 nt, Artificial Sequence
  source: /note="Description of Artificial Sequence: Synthetic oligonucleotide"
  modified_base (1)..(1): Inverted abasic nucleotide
ncaacguacccuucauugaugu

SEQ ID NO: 1582 - RNA, 23 nt, Artificial Sequence
  source: /note="Description of Artificial Sequence: Synthetic oligonucleotide"
acaucaaugaaggguacguuguu

SEQ ID NO: 1583 - RNA, 22 nt, Artificial Sequence
  source: /note="Description of Artificial Sequence: Synthetic oligonucleotide"
  modified_base (1)..(1): Inverted abasic nucleotide
nacguacccuucauugauguuu

SEQ ID NO: 1584 - RNA, 21 nt, Artificial Sequence
  source: /note="Description of Artificial Sequence: Synthetic oligonucleotide"
acaucaaugaaggguacguuu

SEQ ID NO: 1585 - RNA, 21 nt, Artificial Sequence
  source: /note="Description of Artificial Sequence: Synthetic oligonucleotide"
  modified_base (21)..(21): Inverted abasic nucleotide
caacguacccuucauugaugn

SEQ ID NO: 1586 - RNA, 23 nt, Artificial Sequence
  source: /note="Description of Artificial Sequence: Synthetic oligonucleotide"
acaucaaugaaggguacguuguu

SEQ ID NO: 1587 - RNA, 22 nt, Artificial Sequence
  source: /note="Description of Artificial Sequence: Synthetic oligonucleotide"
  modified_base (1)..(1): Inverted abasic nucleotide
ncaacguacccuucauugaugu

SEQ ID NO: 1588 - RNA, 23 nt, Artificial Sequence
  source: /note="Description of Artificial Sequence: Synthetic oligonucleotide"
acaucaaugaaggguacguuguu

SEQ ID NO: 1589 - RNA, 22 nt, Artificial Sequence
  source: /note="Description of Artificial Sequence: Synthetic oligonucleotide"
  modified_base (1)..(1): Inverted abasic nucleotide
ncaacguacccuucauugaugu

SEQ ID NO: 1590 - RNA, 23 nt, Artificial Sequence
  source: /note="Description of Artificial Sequence: Synthetic oligonucleotide"
acaucaaugaaggguacguuguu

SEQ ID NO: 1591 - RNA, 22 nt, Artificial Sequence
  source: /note="Description of Artificial Sequence: Synthetic oligonucleotide"
  modified_base (1)..(1): Inverted abasic nucleotide
ncaacguacccuucauugaugu

SEQ ID NO: 1592 - RNA, 23 nt, Artificial Sequence
  source: /note="Description of Artificial Sequence: Synthetic oligonucleotide"
acaucaaugaaggguacguuguu

SEQ ID NO: 1593 - RNA, 22 nt, Artificial Sequence
  source: /note="Description of Artificial Sequence: Synthetic oligonucleotide"
  modified_base (1)..(1): Inverted abasic nucleotide
ncaacguacccuucauugaugu

SEQ ID NO: 1594 - RNA, 23 nt, Artificial Sequence
  source: /note="Description of Artificial Sequence: Synthetic oligonucleotide"
acaucaaugaaggguacguuguu

SEQ ID NO: 1595 - RNA, 21 nt, Artificial Sequence
  source: /note="Description of Artificial Sequence: Synthetic oligonucleotide"
cugcuucaugccuuucuacau

SEQ ID NO: 1596 - RNA, 23 nt, Artificial Sequence
  source: /note="Description of Artificial Sequence: Synthetic oligonucleotide"
auguagaaaggcaugaagcaguu

SEQ ID NO: 1597 - RNA, 21 nt, Artificial Sequence
  source: /note="Description of Artificial Sequence: Synthetic oligonucleotide"
cugcuucaugccuuucuacau

SEQ ID NO: 1598 - RNA, 23 nt, Artificial Sequence
  source: /note="Description of Artificial Sequence: Synthetic oligonucleotide"
auguagaaaggcaugaagcaguu

SEQ ID NO: 1599 - RNA, 22 nt, Artificial Sequence
  source: /note="Description of Artificial Sequence: Synthetic oligonucleotide"
  modified_base (1)..(1): Inverted abasic nucleotide
ngcuucaugccuuucuacauuu

SEQ ID NO: 1600 - RNA, 21 nt, Artificial Sequence
  source: /note="Description of Artificial Sequence: Synthetic oligonucleotide"
auguagaaaggcaugaagcuu

SEQ ID NO: 1601 - RNA, 22 nt, Artificial Sequence
  source: /note="Description of Artificial Sequence: Synthetic oligonucleotide"
  modified_base (1)..(1): Inverted abasic nucleotide
ngcuucaugccuuucuacauuu

SEQ ID NO: 1602 - RNA, 21 nt, Artificial Sequence
  source: /note="Description of Artificial Sequence: Synthetic oligonucleotide"
auguagaaaggcaugaagcuu

SEQ ID NO: 1603 - RNA, 21 nt, Artificial Sequence
  source: /note="Description of Artificial Sequence: Synthetic oligonucleotide"
cugcuucaugccuuucuacau

SEQ ID NO: 1604 - RNA, 23 nt, Artificial Sequence
  source: /note="Description of Artificial Sequence: Synthetic oligonucleotide"
auguagaaaggcaugaagcaguu

SEQ ID NO: 1605 - RNA, 21 nt, Artificial Sequence
  source: /note="Description of Artificial Sequence: Synthetic oligonucleotide"
cugcuucaugccuuucuacau

SEQ ID NO: 1606 - RNA, 23 nt, Artificial Sequence
  source: /note="Description of Artificial Sequence: Synthetic oligonucleotide"
auguagaaaggcaugaagcaguu

SEQ ID NO: 1607 - RNA, 22 nt, Artificial Sequence
  source: /note="Description of Artificial Sequence: Synthetic oligonucleotide"
  modified_base (1)..(1): Inverted abasic nucleotide
ncugcuucaugccuuucuacau

SEQ ID NO: 1608 - RNA, 23 nt, Artificial Sequence
  source: /note="Description of Artificial Sequence: Synthetic oligonucleotide"
auguagaaaggcaugaagcaguu

SEQ ID NO: 1609 - RNA, 21 nt, Artificial Sequence
  source: /note="Description of Artificial Sequence: Synthetic oligonucleotide"
  modified_base (21)..(21): Inverted abasic nucleotide
cugcuucaugccuuucuacan

SEQ ID NO: 1610 - RNA, 23 nt, Artificial Sequence
  source: /note="Description of Artificial Sequence: Synthetic oligonucleotide"
auguagaaaggcaugaagcaguu

SEQ ID NO: 1611 - RNA, 22 nt, Artificial Sequence
  source: /note="Description of Artificial Sequence: Synthetic oligonucleotide"
  modified_base (1)..(1): Inverted abasic nucleotide
ncugcuucaugccuuucuacau

SEQ ID NO: 1612 - RNA, 23 nt, Artificial Sequence
  source: /note="Description of Artificial Sequence: Synthetic oligonucleotide"
auguagaaaggcaugaagcaguu

SEQ ID NO: 1613 - DNA, 22 bp, Artificial Sequence
  source: /note="Description of Artificial Sequence: Synthetic oligonucleotide"
  source: /note="Description of Combined DNA/RNA Molecule: Synthetic oligonucleotide"
  modified_base (1)..(1): Inverted abasic nucleotide
ncugcuucaugccuuucuacau

SEQ ID NO: 1614 - RNA, 23 nt, Artificial Sequence
  source: /note="Description of Artificial Sequence: Synthetic oligonucleotide"
auguagaaaggcaugaagcaguu

SEQ ID NO: 1615 - RNA, 21 nt, Artificial Sequence
  source: /note="Description of Artificial Sequence: Synthetic oligonucleotide"
cugcuucaugccuuucuacau

SEQ ID NO: 1616 - RNA, 23 nt, Artificial Sequence
  source: /note="Description of Artificial Sequence: Synthetic oligonucleotide"
auguagaaaggcaugaagcaguu

SEQ ID NO: 1617 - RNA, 22 nt, Artificial Sequence
  source: /note="Description of Artificial Sequence: Synthetic oligonucleotide"
  modified_base (1)..(1): Inverted abasic nucleotide
ncugcuucaugccuuucuacau

SEQ ID NO: 1618 - RNA, 23 nt, Artificial Sequence
  source: /note="Description of Artificial Sequence: Synthetic oligonucleotide"
auguagaaaggcaugaagcaguu

SEQ ID NO: 1619 - RNA, 21 nt, Artificial Sequence
  source: /note="Description of Artificial Sequence: Synthetic oligonucleotide"
cugcuucaugccuuucuacau

SEQ ID NO: 1620 - RNA, 23 nt, Artificial Sequence
  source: /note="Description of Artificial Sequence: Synthetic oligonucleotide"
auguagaaaggcaugaagcaguu

SEQ ID NO: 1621 - RNA, 21 nt, Artificial Sequence
  source: /note="Description of Artificial Sequence: Synthetic oligonucleotide"
  modified_base (21)..(21): Inverted abasic nucleotide
cugcuucaugccuuucuacan

SEQ ID NO: 1622 - RNA, 23 nt, Artificial Sequence
  source: /note="Description of Artificial Sequence: Synthetic oligonucleotide"
auguagaaaggcaugaagcaguu

SEQ ID NO: 1623 - RNA, 22 nt, Artificial Sequence
  source: /note="Description of Artificial Sequence: Synthetic oligonucleotide"
  modified_base (1)..(1): Inverted abasic nucleotide
ncugcuucaugccuuucuacau

SEQ ID NO: 1624 - RNA, 23 nt, Artificial Sequence
  source: /note="Description of Artificial Sequence: Synthetic oligonucleotide"
auguagaaaggcaugaagcaguu

SEQ ID NO: 1625 - RNA, 21 nt, Artificial Sequence
  source: /note="Description of Artificial Sequence: Synthetic oligonucleotide"
cugcuucaugccuuucuacau

SEQ ID NO: 1626 - RNA, 23 nt, Artificial Sequence
  source: /note="Description of Artificial Sequence: Synthetic oligonucleotide"
auguagaaaggcaugaagcaguu

SEQ ID NO: 1627 - RNA, 21 nt, Artificial Sequence
  source: /note="Description of Artificial Sequence: Synthetic oligonucleotide"
  modified_base (21)..(21): Inverted abasic nucleotide
cugcuucaugccuuucuacan

SEQ ID NO: 1628 - RNA, 23 nt, Artificial Sequence
  source: /note="Description of Artificial Sequence: Synthetic oligonucleotide"
auguagaaaggcaugaagcaguu

SEQ ID NO: 1629 - RNA, 22 nt, Artificial Sequence
  source: /note="Description of Artificial Sequence: Synthetic oligonucleotide"
  modified_base (1)..(1): Inverted abasic nucleotide
ncugcuucaugccuuucuacau

SEQ ID NO: 1630 - RNA, 23 nt, Artificial Sequence
  source: /note="Description of Artificial Sequence: Synthetic oligonucleotide"
auguagaaaggcaugaagcaguu

SEQ ID NO: 1631 - RNA, 21 nt, Artificial Sequence
  source: /note="Description of Artificial Sequence: Synthetic oligonucleotide"
  modified_base (21)..(21): Inverted abasic nucleotide
cugcuucaugccuuucuacan

SEQ ID NO: 1632 - RNA, 23 nt, Artificial Sequence
  source: /note="Description of Artificial Sequence: Synthetic oligonucleotide"
auguagaaaggcaugaagcaguu

SEQ ID NO: 1633 - RNA, 22 nt, Artificial Sequence
  source: /note="Description of Artificial Sequence: Synthetic oligonucleotide"
  modified_base (1)..(1): Inverted abasic nucleotide
ncugcuucaugccuuucuacau

SEQ ID NO: 1634 - RNA, 23 nt, Artificial Sequence
  source: /note="Description of Artificial Sequence: Synthetic oligonucleotide"
auguagaaaggcaugaagcaguu

SEQ ID NO: 1635 - RNA, 22 nt, Artificial Sequence
  source: /note="Description of Artificial Sequence: Synthetic oligonucleotide"
  modified_base (1)..(1): Inverted abasic nucleotide
ngcuucaugccuuucuacauuu

SEQ ID NO: 1636 - RNA, 21 nt, Artificial Sequence
  source: /note="Description of Artificial Sequence: Synthetic oligonucleotide"
auguagaaaggcaugaagcuu

SEQ ID NO: 1637 - RNA, 22 nt, Artificial Sequence
  source: /note="Description of Artificial Sequence: Synthetic oligonucleotide"
  modified_base (1)..(1): Inverted abasic nucleotide
ngcuucaugccuuucuacauuu

SEQ ID NO: 1638 - RNA, 21 nt, Artificial Sequence
  source: /note="Description of Artificial Sequence: Synthetic oligonucleotide"
auguagaaaggcaugaagcuu

SEQ ID NO: 1639 - RNA, 22 nt, Artificial Sequence
  source: /note="Description of Artificial Sequence: Synthetic oligonucleotide"
  modified_base (1)..(1): Inverted abasic nucleotide
ngcuucaugccuuucuacauuu

SEQ ID NO: 1640 - RNA, 21 nt, Artificial Sequence
  source: /note="Description of Artificial Sequence: Synthetic oligonucleotide"
auguagaaaggcaugaagcuu

SEQ ID NO: 1641 - RNA, 22 nt, Artificial Sequence
  source: /note="Description of Artificial Sequence: Synthetic oligonucleotide"
  modified_base (1)..(1): Inverted abasic nucleotide
ngcuucaugccuuucuacauuu

SEQ ID NO: 1642 - RNA, 21 nt, Artificial Sequence
  source: /note="Description of Artificial Sequence: Synthetic oligonucleotide"
auguagaaaggcaugaagcuu

SEQ ID NO: 1643 - RNA, 22 nt, Artificial Sequence
  source: /note="Description of Artificial Sequence: Synthetic oligonucleotide"
  modified_base (1)..(1): Inverted abasic nucleotide
ngcuucaugccuuucuacauuu

SEQ ID NO: 1644 - RNA, 21 nt, Artificial Sequence
  source: /note="Description of Artificial Sequence: Synthetic oligonucleotide"
auguagaaaggcaugaagcuu

SEQ ID NO: 1645 - RNA, 21 nt, Artificial Sequence
  source: /note="Description of Artificial Sequence: Synthetic oligonucleotide"
cugcuucaugcccuucuacau

SEQ ID NO: 1646 - RNA, 23 nt, Artificial Sequence
  source: /note="Description of Artificial Sequence: Synthetic oligonucleotide"
auguagaagggcaugaagcaguu

SEQ ID NO: 1647 - RNA, 22 nt, Artificial Sequence
  source: /note="Description of Artificial Sequence: Synthetic oligonucleotide"
  modified_base (1)..(1): Inverted abasic nucleotide
ngcuucaugcccuucuacauuu

SEQ ID NO: 1648 - RNA, 21 nt, Artificial Sequence
  source: /note="Description of Artificial Sequence: Synthetic oligonucleotide"
auguagaagggcaugaagcuu

SEQ ID NO: 1649 - RNA, 22 nt, Artificial Sequence
  source: /note="Description of Artificial Sequence: Synthetic oligonucleotide"
  modified_base (1)..(1): Inverted abasic nucleotide
ngcuucaugcccuucuacauuu

SEQ ID NO: 1650 - RNA, 21 nt, Artificial Sequence
  source: /note="Description of Artificial Sequence: Synthetic oligonucleotide"
auguagaagggcaugaagcuu

SEQ ID NO: 1651 - RNA, 22 nt, Artificial Sequence
  source: /note="Description of Artificial Sequence: Synthetic oligonucleotide"
  modified_base (1)..(1): Inverted abasic nucleotide
ngcuucaugcccuucuacauuu

SEQ ID NO: 1652 - RNA, 21 nt, Artificial Sequence
  source: /note="Description of Artificial Sequence: Synthetic oligonucleotide"
auguagaagggcaugaagcuu

SEQ ID NO: 1653 - RNA, 21 nt, Artificial Sequence
  source: /note="Description of Artificial Sequence: Synthetic oligonucleotide"
  modified_base (21)..(21): Inverted abasic nucleotide
cugcuucaugcccuucuacan

SEQ ID NO: 1654 - RNA, 23 nt, Artificial Sequence
  source: /note="Description of Artificial Sequence: Synthetic oligonucleotide"
auguagaagggcaugaagcaguu

SEQ ID NO: 1655 - RNA, 22 nt, Artificial Sequence
  source: /note="Description of Artificial Sequence: Synthetic oligonucleotide"
  modified_base (1)..(1): Inverted abasic nucleotide
ncugcuucaugcccuucuacau

SEQ ID NO: 1656 - RNA, 23 nt, Artificial Sequence
  source: /note="Description of Artificial Sequence: Synthetic oligonucleotide"
auguagaagggcaugaagcaguu

SEQ ID NO: 1657 - RNA, 22 nt, Artificial Sequence
  source: /note="Description of Artificial Sequence: Synthetic oligonucleotide"
  modified_base (1)..(1): Inverted abasic nucleotide
ngcuucaugcccuucuacauuu

SEQ ID NO: 1658 - RNA, 21 nt, Artificial Sequence
  source: /note="Description of Artificial Sequence: Synthetic oligonucleotide"
auguagaagggcaugaagcuu

SEQ ID NO: 1659 - RNA, 21 nt, Artificial Sequence
  source: /note="Description of Artificial Sequence: Synthetic oligonucleotide"
auguuccugcuucaugccuuu

SEQ ID NO: 1660 - RNA, 21 nt, Artificial Sequence
  source: /note="Description of Artificial Sequence: Synthetic oligonucleotide"
aggcaugaagcaggaacauuu

SEQ ID NO: 1661 - RNA, 21 nt, Artificial Sequence
  source: /note="Description of Artificial Sequence: Synthetic oligonucleotide"
uguuccugcuucaugccuuuu

SEQ ID NO: 1662 - RNA, 21 nt, Artificial Sequence
  source: /note="Description of Artificial Sequence: Synthetic oligonucleotide"
aaggcaugaagcaggaacauu

SEQ ID NO: 1663 - RNA, 21 nt, Artificial Sequence
  source: /note="Description of Artificial Sequence: Synthetic oligonucleotide"
ugccuuucuacaguggccuuu

SEQ ID NO: 1664 - RNA, 21 nt, Artificial Sequence
  source: /note="Description of Artificial Sequence: Synthetic oligonucleotide"
aggccacuguagaaaggcauu

SEQ ID NO: 1665 - RNA, 21 nt, Artificial Sequence
  source: /note="Description of Artificial Sequence: Synthetic oligonucleotide"
cguacuucguccuuguauguu

SEQ ID NO: 1666 - RNA, 21 nt, Artificial Sequence
  source: /note="Description of Artificial Sequence: Synthetic oligonucleotide"
cauacaaggacgaaguacguu

SEQ ID NO: 1667 - DNA, 22 bp, Artificial Sequence
  source: /note="Description of Artificial Sequence: Synthetic oligonucleotide"
  source: /note="Description of Combined DNA/RNA Molecule: Synthetic oligonucleotide"
  modified_base (1)..(1): Inverted abasic nucleotide
ngcuucaugcccuucuacauuu

SEQ ID NO: 1668 - RNA, 21 nt, Artificial Sequence
  source: /note="Description of Artificial Sequence: Synthetic oligonucleotide"
auguagaagggcaugaagcuu

SEQ ID NO: 1669 - RNA, 22 nt, Artificial Sequence
  source: /note="Description of Artificial Sequence: Synthetic oligonucleotide"
  modified_base (1)..(1): Inverted abasic nucleotide
ngcuucaugcccuucuacauuu

SEQ ID NO: 1670 - RNA, 21 nt, Artificial Sequence
  source: /note="Description of Artificial Sequence: Synthetic oligonucleotide"
auguagaagggcaugaagcuu

SEQ ID NO: 1671 - RNA, 22 nt, Artificial Sequence
  source: /note="Description of Artificial Sequence: Synthetic oligonucleotide"
  modified_base (1)..(1): Inverted abasic nucleotide
ngcuucaugcccuucuacauuu

SEQ ID NO: 1672 - RNA, 21 nt, Artificial Sequence
  source: /note="Description of Artificial Sequence: Synthetic oligonucleotide"
auguagaagggcaugaagcuu

SEQ ID NO: 1673 - RNA, 22 nt, Artificial Sequence
  source: /note="Description of Artificial Sequence: Synthetic oligonucleotide"
  modified_base (1)..(1): Inverted abasic nucleotide
ngcuucaugcccuucuacauuu

SEQ ID NO: 1674 - RNA, 21 nt, Artificial Sequence
  source: /note="Description of Artificial Sequence: Synthetic oligonucleotide"
auguagaagggcaugaagcuu

SEQ ID NO: 1675 - RNA, 22 nt, Artificial Sequence
  source: /note="Description of Artificial Sequence: Synthetic oligonucleotide"
  modified_base (1)..(1): Inverted abasic nucleotide
ngcuucaugcccuucuacauuu

SEQ ID NO: 1676 - RNA, 21 nt, Artificial Sequence
  source: /note="Description of Artificial Sequence: Synthetic oligonucleotide"
auguagaagggcaugaagcuu

SEQ ID NO: 1677 - RNA, 22 nt, Artificial Sequence
  source: /note="Description of Artificial Sequence: Synthetic oligonucleotide"
  modified_base (1)..(1): Inverted abasic nucleotide
ngcuucaugcccuucuacauuu

SEQ ID NO: 1678 - RNA, 21 nt, Artificial Sequence
  source: /note="Description of Artificial Sequence: Synthetic oligonucleotide"
auguagaagggcaugaagcuu

SEQ ID NO: 1679 - RNA, 22 nt, Artificial Sequence
  source: /note="Description of Artificial Sequence: Synthetic oligonucleotide"
  modified_base (1)..(1): Inverted abasic nucleotide
nccugcuucaugccuuucuauu

SEQ ID NO: 1680 - RNA, 21 nt, Artificial Sequence
  source: /note="Description of Artificial Sequence: Synthetic oligonucleotide"
uagaaaggcaugaagcagguu

SEQ ID NO: 1681 - RNA, 22 nt, Artificial Sequence
  source: /note="Description of Artificial Sequence: Synthetic oligonucleotide"
  modified_base (1)..(1): Inverted abasic nucleotide
nccugcuucaugccuuucuauu

SEQ ID NO: 1682 - RNA, 21 nt, Artificial Sequence
  source: /note="Description of Artificial Sequence: Synthetic oligonucleotide"
uagaaaggcaugaagcagguu

SEQ ID NO: 1683 - RNA, 21 nt, Artificial Sequence
  source: /note="Description of Artificial Sequence: Synthetic oligonucleotide"
  modified_base (21)..(21): Inverted abasic nucleotide
uuccugcuucaugccuuucun

SEQ ID NO: 1684 - RNA, 23 nt, Artificial Sequence
  source: /note="Description of Artificial Sequence: Synthetic oligonucleotide"
uagaaaggcaugaagcaggaauu

SEQ ID NO: 1685 - RNA, 22 nt, Artificial Sequence
  source: /note="Description of Artificial Sequence: Synthetic oligonucleotide"
  modified_base (1)..(1): Inverted abasic nucleotide
nccugcuucaugccuuucuauu

SEQ ID NO: 1686 - RNA, 21 nt, Artificial Sequence
  source: /note="Description of Artificial Sequence: Synthetic oligonucleotide"
uagaaaggcaugaagcagguu

SEQ ID NO: 1687 - RNA, 21 nt, Artificial Sequence
  source: /note="Description of Artificial Sequence: Synthetic oligonucleotide"
  modified_base (21)..(21): Inverted abasic nucleotide
uuccugcuucaugccuuucun

SEQ ID NO: 1688 - RNA, 23 nt, Artificial Sequence
  source: /note="Description of Artificial Sequence: Synthetic oligonucleotide"
uagaaaggcaugaagcaggaauu

SEQ ID NO: 1689 - RNA, 22 nt, Artificial Sequence
  source: /note="Description of Artificial Sequence: Synthetic oligonucleotide"
  modified_base (1)..(1): Inverted abasic nucleotide
naugccuuucuacaguggcuuu

SEQ ID NO: 1690 - RNA, 21 nt, Artificial Sequence
  source: /note="Description of Artificial Sequence: Synthetic oligonucleotide"
agccacuguagaaaggcauuu

SEQ ID NO: 1691 - RNA, 22 nt, Artificial Sequence
  source: /note="Description of Artificial Sequence: Synthetic oligonucleotide"
  modified_base (1)..(1): Inverted abasic nucleotide
naugccuuucuacaguggcuuu

SEQ ID NO: 1692 - RNA, 21 nt, Artificial Sequence
  source: /note="Description of Artificial Sequence: Synthetic oligonucleotide"
agccacuguagaaaggcauuu

SEQ ID NO: 1693 - RNA, 22 nt, Artificial Sequence
  source: /note="Description of Artificial Sequence: Synthetic oligonucleotide"
  modified_base (1)..(1): Inverted abasic nucleotide
naugccuuucuacaguggcuuu

SEQ ID NO: 1694 - RNA, 21 nt, Artificial Sequence
  source: /note="Description of Artificial Sequence: Synthetic oligonucleotide"
agccacuguagaaaggcauuu

SEQ ID NO: 1695 - RNA, 21 nt, Artificial Sequence
  source: /note="Description of Artificial Sequence: Synthetic oligonucleotide"
  modified_base (21)..(21): Inverted abasic nucleotide
ucaugccuuucuacaguggcn

SEQ ID NO: 1696 - RNA, 23 nt, Artificial Sequence
  source: /note="Description of Artificial Sequence: Synthetic oligonucleotide"
agccacuguagaaaggcaugauu

SEQ ID NO: 1697 - RNA, 22 nt, Artificial Sequence
  source: /note="Description of Artificial Sequence: Synthetic oligonucleotide"
  modified_base (1)..(1): Inverted abasic nucleotide
naugccuuucuacaguggcuuu

SEQ ID NO: 1698 - RNA, 21 nt, Artificial Sequence
  source: /note="Description of Artificial Sequence: Synthetic oligonucleotide"
agccacuguagaaaggcauuu

SEQ ID NO: 1699 - RNA, 22 nt, Artificial Sequence
  source: /note="Description of Artificial Sequence: Synthetic oligonucleotide"
  modified_base (1)..(1): Inverted abasic nucleotide
nucaugccuuucuacaguggcu

SEQ ID NO: 1700 - RNA, 23 nt, Artificial Sequence
  source: /note="Description of Artificial Sequence: Synthetic oligonucleotide"
agccacuguagaaaggcaugauu

SEQ ID NO: 1701 - RNA, 22 nt, Artificial Sequence
  source: /note="Description of Artificial Sequence: Synthetic oligonucleotide"
  modified_base (1)..(1): Inverted abasic nucleotide
nugcuucaugccuuucuacagu

SEQ ID NO: 1702 - RNA, 23 nt, Artificial Sequence
  source: /note="Description of Artificial Sequence: Synthetic oligonucleotide"
acuguagaaaggcaugaagcauu

SEQ ID NO: 1703 - RNA, 22 nt, Artificial Sequence
  source: /note="Description of Artificial Sequence: Synthetic oligonucleotide"
  modified_base (1)..(1): Inverted abasic nucleotide
ncuucaugccuuucuacaguuu

SEQ ID NO: 1704 - RNA, 21 nt, Artificial Sequence
  source: /note="Description of Artificial Sequence: Synthetic oligonucleotide"
acuguagaaaggcaugaaguu

SEQ ID NO: 1705 - RNA, 21 nt, Artificial Sequence
  source: /note="Description of Artificial Sequence: Synthetic oligonucleotide"
  modified_base (21)..(21): Inverted abasic nucleotide
ugcuucaugccuuucuacagn

SEQ ID NO: 1706 - RNA, 23 nt, Artificial Sequence
  source: /note="Description of Artificial Sequence: Synthetic oligonucleotide"
acuguagaaaggcaugaagcauu

SEQ ID NO: 1707 - RNA, 22 nt, Artificial Sequence
  source: /note="Description of Artificial Sequence: Synthetic oligonucleotide"
  modified_base (1)..(1): Inverted abasic nucleotide
ncuucaugccuuucuacaguuu

SEQ ID NO: 1708 - RNA, 21 nt, Artificial Sequence
  source: /note="Description of Artificial Sequence: Synthetic oligonucleotide"
acuguagaaaggcaugaaguu

SEQ ID NO: 1709 - RNA, 21 nt, Artificial Sequence
  source: /note="Description of Artificial Sequence: Synthetic oligonucleotide"
  modified_base (21)..(21): Inverted abasic nucleotide
ugcuucaugccuuucuacagn

SEQ ID NO: 1710 - RNA, 23 nt, Artificial Sequence
  source: /note="Description of Artificial Sequence: Synthetic oligonucleotide"
acuguagaaaggcaugaagcauu

SEQ ID NO: 1711 - RNA, 22 nt, Artificial Sequence
  source: /note="Description of Artificial Sequence: Synthetic oligonucleotide"
  modified_base (1)..(1): Inverted abasic nucleotide
nugcuucaugccuuucuacagu

SEQ ID NO: 1712 - RNA, 23 nt, Artificial Sequence
  source: /note="Description of Artificial Sequence: Synthetic oligonucleotide"
acuguagaaaggcaugaagcauu

SEQ ID NO: 1713 - RNA, 22 nt, Artificial Sequence
  source: /note="Description of Artificial Sequence: Synthetic oligonucleotide"
  modified_base (1)..(1): Inverted abasic nucleotide
nugcuucaugccuuucuacagu

SEQ ID NO: 1714 - RNA, 23 nt, Artificial Sequence
  source: /note="Description of Artificial Sequence: Synthetic oligonucleotide"
acuguagaaaggcaugaagcauu

SEQ ID NO: 1715 - RNA, 22 nt, Artificial Sequence
  source: /note="Description of Artificial Sequence: Synthetic oligonucleotide"
  modified_base (1)..(1): Inverted abasic nucleotide
nugcuucaugccuuucuacagu

SEQ ID NO: 1716 - RNA, 23 nt, Artificial Sequence
  source: /note="Description of Artificial Sequence: Synthetic oligonucleotide"
acuguagaaaggcaugaagcauu

SEQ ID NO: 1717 - RNA, 22 nt, Artificial Sequence
  source: /note="Description of Artificial Sequence: Synthetic oligonucleotide"
  modified_base (1)..(1): Inverted abasic nucleotide
nugcuucaugccuuucuacagu

SEQ ID NO: 1718 - RNA, 23 nt, Artificial Sequence
  source: /note="Description of Artificial Sequence: Synthetic oligonucleotide"
acuguagaaaggcaugaagcauu

SEQ ID NO: 1719 - RNA, 22 nt, Artificial Sequence
  source: /note="Description of Artificial Sequence: Synthetic oligonucleotide"
  modified_base (1)..(1): Inverted abasic nucleotide
nguuccugcuucaugccuuuuu

SEQ ID NO: 1720 - RNA, 21 nt, Artificial Sequence
  source: /note="Description of Artificial Sequence: Synthetic oligonucleotide"
aaaggcaugaagcaggaacuu

SEQ ID NO: 1721 - RNA, 22 nt, Artificial Sequence
  source: /note="Description of Artificial Sequence: Synthetic oligonucleotide"
  modified_base (1)..(1): Inverted abasic nucleotide
nccugcuucaugccuuucuauu

SEQ ID NO: 1722 - RNA, 21 nt, Artificial Sequence
  source: /note="Description of Artificial Sequence: Synthetic oligonucleotide"
uagaaaggcaugaagcagguu

SEQ ID NO: 1723 - RNA, 22 nt, Artificial Sequence
  source: /note="Description of Artificial Sequence: Synthetic oligonucleotide"
  modified_base (1)..(1): Inverted abasic nucleotide
ncuucaugccuuucuacaguuu

SEQ ID NO: 1724 - RNA, 21 nt, Artificial Sequence
  source: /note="Description of Artificial Sequence: Synthetic oligonucleotide"
acuguagaaaggcaugaaguu

SEQ ID NO: 1725 - RNA, 22 nt, Artificial Sequence
  source: /note="Description of Artificial Sequence: Synthetic oligonucleotide"
  modified_base (1)..(1): Inverted abasic nucleotide
nuuccugcuucaugccuuucua

SEQ ID NO: 1726 - RNA, 23 nt, Artificial Sequence
  source: /note="Description of Artificial Sequence: Synthetic oligonucleotide"
uagaaaggcaugaagcaggaauu

SEQ ID NO: 1727 - RNA, 21 nt, Artificial Sequence
  source: /note="Description of Artificial Sequence: Synthetic oligonucleotide"
  modified_base (21)..(21): Inverted abasic nucleotide
uuccugcuucaugccuuucun

SEQ ID NO: 1728 - RNA, 23 nt, Artificial Sequence
  source: /note="Description of Artificial Sequence: Synthetic oligonucleotide"
uagaaaggcaugaagcaggaauu

SEQ ID NO: 1729 - RNA, 22 nt, Artificial Sequence
  source: /note="Description of Artificial Sequence: Synthetic oligonucleotide"
  modified_base (1)..(1): Inverted abasic nucleotide
nuuccugcuucaugccuuucua

SEQ ID NO: 1730 - RNA, 23 nt, Artificial Sequence
  source: /note="Description of Artificial Sequence: Synthetic oligonucleotide"
uagaaaggcaugaagcaggaauu

SEQ ID NO: 1731 - RNA, 21 nt, Artificial Sequence
  source: /note="Description of Artificial Sequence: Synthetic oligonucleotide"
  modified_base (21)..(21): Inverted abasic nucleotide
uuccugcuucaugccuuucun

SEQ ID NO: 1732 - RNA, 23 nt, Artificial Sequence
  source: /note="Description of Artificial Sequence: Synthetic oligonucleotide"
uagaaaggcaugaagcaggaauu

SEQ ID NO: 1733 - RNA, 22 nt, Artificial Sequence
  source: /note="Description of Artificial Sequence: Synthetic oligonucleotide"
  modified_base (1)..(1): Inverted abasic nucleotide
nuuccugcuucaugccuuucua

SEQ ID NO: 1734 - RNA, 23 nt, Artificial Sequence
  source: /note="Description of Artificial Sequence: Synthetic oligonucleotide"
uagaaaggcaugaagcaggaauu

SEQ ID NO: 1735 - RNA, 22 nt, Artificial Sequence
  source: /note="Description of Artificial Sequence: Synthetic oligonucleotide"
  modified_base (1)..(1): Inverted abasic nucleotide
nuuccugcuucaugccuuucua

SEQ ID NO: 1736 - RNA, 23 nt, Artificial Sequence
  source: /note="Description of Artificial Sequence: Synthetic oligonucleotide"
uagaaaggcaugaagcaggaauu

SEQ ID NO: 1737 - RNA, 22 nt, Artificial Sequence
  source: /note="Description of Artificial Sequence: Synthetic oligonucleotide"
  modified_base (1)..(1): Inverted abasic nucleotide
nuuccugcuucaugccuuucua

SEQ ID NO: 1738 - RNA, 23 nt, Artificial Sequence
  source: /note="Description of Artificial Sequence: Synthetic oligonucleotide"
uagaaaggcaugaagcaggaauu

SEQ ID NO: 1739 - RNA, 22 nt, Artificial Sequence
  source: /note="Description of Artificial Sequence: Synthetic oligonucleotide"
  modified_base (1)..(1): Inverted abasic nucleotide
nuuccugcuucaugccuuucua

SEQ ID NO: 1740 - RNA, 23 nt, Artificial Sequence
  source: /note="Description of Artificial Sequence: Synthetic oligonucleotide"
uagaaaggcaugaagcaggaauu

SEQ ID NO: 1741 - RNA, 22 nt, Artificial Sequence
  source: /note="Description of Artificial Sequence: Synthetic oligonucleotide"
  modified_base (1)..(1): Inverted abasic nucleotide
nuuccugcuucaugccuuucua

SEQ ID NO: 1742 - RNA, 23 nt, Artificial Sequence
  source: /note="Description of Artificial Sequence: Synthetic oligonucleotide"
uagaaaggcaugaagcaggaauu

SEQ ID NO: 1743 - RNA, 22 nt, Artificial Sequence
  source: /note="Description of Artificial Sequence: Synthetic oligonucleotide"
  modified_base (1)..(1): Inverted abasic nucleotide
nuuccugcuucaugccuuucua

SEQ ID NO: 1744 - RNA, 23 nt, Artificial Sequence
  source: /note="Description of Artificial Sequence: Synthetic oligonucleotide"
uagaaaggcaugaagcaggaauu

SEQ ID NO: 1745 - RNA, 22 nt, Artificial Sequence
  source: /note="Description of Artificial Sequence: Synthetic oligonucleotide"
  modified_base (1)..(1): Inverted abasic nucleotide
nucaugccuuucuacaguggcu

SEQ ID NO: 1746 - RNA, 23 nt, Artificial Sequence
  source: /note="Description of Artificial Sequence: Synthetic oligonucleotide"
agccacuguagaaaggcaugauu

SEQ ID NO: 1747 - RNA, 21 nt, Artificial Sequence
  source: /note="Description of Artificial Sequence: Synthetic oligonucleotide"
  modified_base (21)..(21): Inverted abasic nucleotide
ucaugccuuucuacaguggcn

SEQ ID NO: 1748 - RNA, 23 nt, Artificial Sequence
  source: /note="Description of Artificial Sequence: Synthetic oligonucleotide"
agccacuguagaaaggcaugauu

SEQ ID NO: 1749 - RNA, 22 nt, Artificial Sequence
  source: /note="Description of Artificial Sequence: Synthetic oligonucleotide"
  modified_base (1)..(1): Inverted abasic nucleotide
nucaugccuuucuacaguggcu

SEQ ID NO: 1750 - RNA, 23 nt, Artificial Sequence
  source: /note="Description of Artificial Sequence: Synthetic oligonucleotide"
agccacuguagaaaggcaugauu

SEQ ID NO: 1751 - RNA, 21 nt, Artificial Sequence
  source: /note="Description of Artificial Sequence: Synthetic oligonucleotide"
  modified_base (21)..(21): Inverted abasic nucleotide
ucaugccuuucuacaguggcn

SEQ ID NO: 1752 - RNA, 23 nt, Artificial Sequence
  source: /note="Description of Artificial Sequence: Synthetic oligonucleotide"
agccacuguagaaaggcaugauu

SEQ ID NO: 1753 - RNA, 22 nt, Artificial Sequence
  source: /note="Description of Artificial Sequence: Synthetic oligonucleotide"
  modified_base (1)..(1): Inverted abasic nucleotide
nucaugccuuucuacaguggcu

SEQ ID NO: 1754 - RNA, 23 nt, Artificial Sequence
  source: /note="Description of Artificial Sequence: Synthetic oligonucleotide"
agccacuguagaaaggcaugauu

SEQ ID NO: 1755 - RNA, 22 nt, Artificial Sequence
  source: /note="Description of Artificial Sequence: Synthetic oligonucleotide"
  modified_base (1)..(1): Inverted abasic nucleotide
nucaugccuuucuacaguggcu

SEQ ID NO: 1756 - RNA, 23 nt, Artificial Sequence
  source: /note="Description of Artificial Sequence: Synthetic oligonucleotide"
agccacuguagaaaggcaugauu

SEQ ID NO: 1757 - RNA, 21 nt, Artificial Sequence
  source: /note="Description of Artificial Sequence: Synthetic oligonucleotide"
  modified_base (21)..(21): Inverted abasic nucleotide
ucaugccuuucuacaguggcn

SEQ ID NO: 1758 - RNA, 23 nt, Artificial Sequence
  source: /note="Description of Artificial Sequence: Synthetic oligonucleotide"
agccacuguagaaaggcaugauu

SEQ ID NO: 1759 - RNA, 22 nt, Artificial Sequence
  source: /note="Description of Artificial Sequence: Synthetic oligonucleotide"
  modified_base (1)..(1): Inverted abasic nucleotide
nucaugccuuucuacaguggcu

SEQ ID NO: 1760 - RNA, 23 nt, Artificial Sequence
  source: /note="Description of Artificial Sequence: Synthetic oligonucleotide"
agccacuguagaaaggcaugauu

SEQ ID NO: 1761 - RNA, 22 nt, Artificial Sequence
  source: /note="Description of Artificial Sequence: Synthetic oligonucleotide"
  modified_base (1)..(1): Inverted abasic nucleotide
nucaugccuuucuacaguggcu

SEQ ID NO: 1762 - RNA, 23 nt, Artificial Sequence
  source: /note="Description of Artificial Sequence: Synthetic oligonucleotide"
agccacuguagaaaggcaugauu

SEQ ID NO: 1763 - RNA, 22 nt, Artificial Sequence
  source: /note="Description of Artificial Sequence: Synthetic oligonucleotide"
  modified_base (1)..(1): Inverted abasic nucleotide
nucaugccuuucuacaguggcu

SEQ ID NO: 1764 - RNA, 23 nt, Artificial Sequence
  source: /note="Description of Artificial Sequence: Synthetic oligonucleotide"
agccacuguagaaaggcaugauu

SEQ ID NO: 1765 - RNA, 22 nt, Artificial Sequence
  source: /note="Description of Artificial Sequence: Synthetic oligonucleotide"
  modified_base (1)..(1): Inverted abasic nucleotide
nugcuucaugccuuucuacagu

SEQ ID NO: 1766 - RNA, 23 nt, Artificial Sequence
  source: /note="Description of Artificial Sequence: Synthetic oligonucleotide"
acuguagaaaggcaugaagcauu

SEQ ID NO: 1767 - RNA, 21 nt, Artificial Sequence
  source: /note="Description of Artificial Sequence: Synthetic oligonucleotide"
  modified_base (21)..(21): Inverted abasic nucleotide
ugcuucaugccuuucuacagn

SEQ ID NO: 1768 - RNA, 23 nt, Artificial Sequence
  source: /note="Description of Artificial Sequence: Synthetic oligonucleotide"
acuguagaaaggcaugaagcauu

SEQ ID NO: 1769 - RNA, 21 nt, Artificial Sequence
  source: /note="Description of Artificial Sequence: Synthetic oligonucleotide"
  modified_base (21)..(21): Inverted abasic nucleotide
ugcuucaugccuuucuacagn

SEQ ID NO: 1770 - RNA, 23 nt, Artificial Sequence
  source: /note="Description of Artificial Sequence: Synthetic oligonucleotide"
acuguagaaaggcaugaagcauu

SEQ ID NO: 1771 - RNA, 22 nt, Artificial Sequence
  source: /note="Description of Artificial Sequence: Synthetic oligonucleotide"
  modified_base (1)..(1): Inverted abasic nucleotide
nugcuucaugccuuucuacagu

SEQ ID NO: 1772 - RNA, 23 nt, Artificial Sequence
  source: /note="Description of Artificial Sequence: Synthetic oligonucleotide"
acuguagaaaggcaugaagcauu

SEQ ID NO: 1773 - RNA, 22 nt, Artificial Sequence
  source: /note="Description of Artificial Sequence: Synthetic oligonucleotide"
  modified_base (1)..(1): Inverted abasic nucleotide
ncuucaugccuuucuacaguuu

SEQ ID NO: 1774 - RNA, 21 nt, Artificial Sequence
  source: /note="Description of Artificial Sequence: Synthetic oligonucleotide"
acuguagaaaggcaugaaguu

SEQ ID NO: 1775 - RNA, 22 nt, Artificial Sequence
  source: /note="Description of Artificial Sequence: Synthetic oligonucleotide"
  modified_base (1)..(1): Inverted abasic nucleotide
nugcuucaugccuuucuacagu

SEQ ID NO: 1776 - RNA, 23 nt, Artificial Sequence
  source: /note="Description of Artificial Sequence: Synthetic oligonucleotide"
acuguagaaaggcaugaagcauu

SEQ ID NO: 1777 - RNA, 22 nt, Artificial Sequence
  source: /note="Description of Artificial Sequence: Synthetic oligonucleotide"
  modified_base (1)..(1): Inverted abasic nucleotide
ngcuucaugccuuucuacauuu

SEQ ID NO: 1778 - RNA, 21 nt, Artificial Sequence
  source: /note="Description of Artificial Sequence: Synthetic oligonucleotide"
auguagaaaggcaugaagcuu

SEQ ID NO: 1779 - RNA, 22 nt, Artificial Sequence
  source: /note="Description of Artificial Sequence: Synthetic oligonucleotide"
  modified_base (1)..(1): Inverted abasic nucleotide
ncaugccuuucuacagugguuu

SEQ ID NO: 1780 - RNA, 21 nt, Artificial Sequence
  source: /note="Description of Artificial Sequence: Synthetic oligonucleotide"
accacuguagaaaggcauguu

SEQ ID NO: 1781 - RNA, 22 nt, Artificial Sequence
  source: /note="Description of Artificial Sequence: Synthetic oligonucleotide"
  modified_base (1)..(1): Inverted abasic nucleotide
ncugcuucaugccuuucuaauu

SEQ ID NO: 1782 - RNA, 21 nt, Artificial Sequence
  source: /note="Description of Artificial Sequence: Synthetic oligonucleotide"
uuagaaaggcaugaagcaguu

SEQ ID NO: 1783 - RNA, 22 nt, Artificial Sequence
  source: /note="Description of Artificial Sequence: Synthetic oligonucleotide"
  modified_base (1)..(1): Inverted abasic nucleotide
ngcuucaugccuuucuacaauu

SEQ ID NO: 1784 - RNA, 21 nt, Artificial Sequence
  source: /note="Description of Artificial Sequence: Synthetic oligonucleotide"
uuguagaaaggcaugaagcuu

SEQ ID NO: 1785 - RNA, 22 nt, Artificial Sequence
  source: /note="Description of Artificial Sequence: Synthetic oligonucleotide"
  modified_base (1)..(1): Inverted abasic nucleotide
nuucaugccuuucuacaguauu

SEQ ID NO: 1786 - RNA, 21 nt, Artificial Sequence
  source: /note="Description of Artificial Sequence: Synthetic oligonucleotide"
uacuguagaaaggcaugaauu

SEQ ID NO: 1787 - RNA, 22 nt, Artificial Sequence
  source: /note="Description of Artificial Sequence: Synthetic oligonucleotide"
  modified_base (1)..(1): Inverted abasic nucleotide
nguuccugcuucaugccuuuuu

SEQ ID NO: 1788 - RNA, 21 nt, Artificial Sequence
  source: /note="Description of Artificial Sequence: Synthetic oligonucleotide"
aaaggcaugaagcaggaacuu

SEQ ID NO: 1789 - RNA, 21 nt, Artificial Sequence
  source: /note="Description of Artificial Sequence: Synthetic oligonucleotide"
  modified_base (21)..(21): Inverted abasic nucleotide
auguuccugcuucaugccuun

SEQ ID NO: 1790 - RNA, 23 nt, Artificial Sequence
  source: /note="Description of Artificial Sequence: Synthetic oligonucleotide"
aaaggcaugaagcaggaacauuu

SEQ ID NO: 1791 - RNA, 22 nt, Artificial Sequence
  source: /note="Description of Artificial Sequence: Synthetic oligonucleotide"
  modified_base (1)..(1): Inverted abasic nucleotide
nauguuccugcuucaugccuuu

SEQ ID NO: 1792 - RNA, 23 nt, Artificial Sequence
  source: /note="Description of Artificial Sequence: Synthetic oligonucleotide"
aaaggcaugaagcaggaacauuu

SEQ ID NO: 1793 - RNA, 22 nt, Artificial Sequence
  source: /note="Description of Artificial Sequence: Synthetic oligonucleotide"
  modified_base (1)..(1): Inverted abasic nucleotide
nguuccugcuucaugccuuuuu

SEQ ID NO: 1794 - RNA, 21 nt, Artificial Sequence
  source: /note="Description of Artificial Sequence: Synthetic oligonucleotide"
aaaggcaugaagcaggaacuu

SEQ ID NO: 1795 - RNA, 21 nt, Artificial Sequence
  source: /note="Description of Artificial Sequence: Synthetic oligonucleotide"
  modified_base (21)..(21): Inverted abasic nucleotide
auguuccugcuucaugccuun

SEQ ID NO: 1796 - RNA, 23 nt, Artificial Sequence
  source: /note="Description of Artificial Sequence: Synthetic oligonucleotide"
aaaggcaugaagcaggaacauuu

SEQ ID NO: 1797 - RNA, 22 nt, Artificial Sequence
  source: /note="Description of Artificial Sequence: Synthetic oligonucleotide"
  modified_base (1)..(1): Inverted abasic nucleotide
nauguuccugcuucaugccuuu

SEQ ID NO: 1798 - RNA, 23 nt, Artificial Sequence
  source: /note="Description of Artificial Sequence: Synthetic oligonucleotide"
aaaggcaugaagcaggaacauuu

SEQ ID NO: 1799 - RNA, 22 nt, Artificial Sequence
  source: /note="Description of Artificial Sequence: Synthetic oligonucleotide"
  modified_base (1)..(1): Inverted abasic nucleotide
nguuccugcuucaugccuuuuu

SEQ ID NO: 1800 - RNA, 21 nt, Artificial Sequence
  source: /note="Description of Artificial Sequence: Synthetic oligonucleotide"
aaaggcaugaagcaggaacuu

SEQ ID NO: 1801 - RNA, 21 nt, Artificial Sequence
  source: /note="Description of Artificial Sequence: Synthetic oligonucleotide"
  modified_base (21)..(21): Inverted abasic nucleotide
auguuccugcuucaugccuun

SEQ ID NO: 1802 - RNA, 23 nt, Artificial Sequence
  source: /note="Description of Artificial Sequence: Synthetic oligonucleotide"
aaaggcaugaagcaggaacauuu

SEQ ID NO: 1803 - RNA, 22 nt, Artificial Sequence
  source: /note="Description of Artificial Sequence: Synthetic oligonucleotide"
  modified_base (1)..(1): Inverted abasic nucleotide
nauguuccugcuucaugccuuu

SEQ ID NO: 1804 - RNA, 23 nt, Artificial Sequence
  source: /note="Description of Artificial Sequence: Synthetic oligonucleotide"
aaaggcaugaagcaggaacauuu

SEQ ID NO: 1805 - RNA, 22 nt, Artificial Sequence
  source: /note="Description of Artificial Sequence: Synthetic oligonucleotide"
  modified_base (1)..(1): Inverted abasic nucleotide
nauguuccugcuucaugccuuu

SEQ ID NO: 1806 - RNA, 23 nt, Artificial Sequence
  source: /note="Description of Artificial Sequence: Synthetic oligonucleotide"
aaaggcaugaagcaggaacauuu

SEQ ID NO: 1807 - RNA, 22 nt, Artificial Sequence
  source: /note="Description of Artificial Sequence: Synthetic oligonucleotide"
  modified_base (1)..(1): Inverted abasic nucleotide
nauguuccugcuucaugccuuu

SEQ ID NO: 1808 - RNA, 23 nt, Artificial Sequence
  source: /note="Description of Artificial Sequence: Synthetic oligonucleotide"
aaaggcaugaagcaggaacauuu

SEQ ID NO: 1809 - RNA, 22 nt, Artificial Sequence
  source: /note="Description of Artificial Sequence: Synthetic oligonucleotide"
  modified_base (1)..(1): Inverted abasic nucleotide
ngcuucaugccuuucuacagua

SEQ ID NO: 1810 - RNA, 23 nt, Artificial Sequence
  source: /note="Description of Artificial Sequence: Synthetic oligonucleotide"
uacuguagaaaggcaugaagcuu

SEQ ID NO: 1811 - RNA, 22 nt, Artificial Sequence
  source: /note="Description of Artificial Sequence: Synthetic oligonucleotide"
  modified_base (1)..(1): Inverted abasic nucleotide
ngcuucaugccuuucuacagua

SEQ ID NO: 1812 - RNA, 23 nt, Artificial Sequence
  source: /note="Description of Artificial Sequence: Synthetic oligonucleotide"
uacuguagaaaggcaugaagcuu

SEQ ID NO: 1813 - RNA, 22 nt, Artificial Sequence
  source: /note="Description of Artificial Sequence: Synthetic oligonucleotide"
  modified_base (1)..(1): Inverted abasic nucleotide
nuucaugccuuucuacaguauu

SEQ ID NO: 1814 - RNA, 21 nt, Artificial Sequence
  source: /note="Description of Artificial Sequence: Synthetic oligonucleotide"
uacuguagaaaggcaugaauu

SEQ ID NO: 1815 - RNA, 22 nt, Artificial Sequence
  source: /note="Description of Artificial Sequence: Synthetic oligonucleotide"
  modified_base (1)..(1): Inverted abasic nucleotide
ngcuucaugccuuucuacagua

SEQ ID NO: 1816 - RNA, 23 nt, Artificial Sequence
  source: /note="Description of Artificial Sequence: Synthetic oligonucleotide"
uacuguagaaaggcaugaagcuu

SEQ ID NO: 1817 - RNA, 21 nt, Artificial Sequence
  source: /note="Description of Artificial Sequence: Synthetic oligonucleotide"
  modified_base (21)..(21): Inverted abasic nucleotide
gcuucaugccuuucuacagun

SEQ ID NO: 1818 - RNA, 23 nt, Artificial Sequence
  source: /note="Description of Artificial Sequence: Synthetic oligonucleotide"
uacuguagaaaggcaugaagcuu

SEQ ID NO: 1819 - RNA, 22 nt, Artificial Sequence
  source: /note="Description of Artificial Sequence: Synthetic oligonucleotide"
  modified_base (1)..(1): Inverted abasic nucleotide
ngcggcuuccugggcuucuauu

SEQ ID NO: 1820 - RNA, 21 nt, Artificial Sequence
  source: /note="Description of Artificial Sequence: Synthetic oligonucleotide"
uagaagcccaggaagccgcuu

SEQ ID NO: 1821 - RNA, 22 nt, Artificial Sequence
  source: /note="Description of Artificial Sequence: Synthetic oligonucleotide"
  modified_base (1)..(1): Inverted abasic nucleotide
nauggcuuccagauaugccuuu

SEQ ID NO: 1822 - RNA, 21 nt, Artificial Sequence
  source: /note="Description of Artificial Sequence: Synthetic oligonucleotide"
aggcauaucuggaagccauuu

SEQ ID NO: 1823 - RNA, 22 nt, Artificial Sequence
  source: /note="Description of Artificial Sequence: Synthetic oligonucleotide"
  modified_base (1)..(1): Inverted abasic nucleotide
nacauggcuuccagauaugccu

SEQ ID NO: 1824 - RNA, 23 nt, Artificial Sequence
  source: /note="Description of Artificial Sequence: Synthetic oligonucleotide"
aggcauaucuggaagccauguuu

SEQ ID NO: 1825 - RNA, 22 nt, Artificial Sequence
  source: /note="Description of Artificial Sequence: Synthetic oligonucleotide"
  modified_base (1)..(1): Inverted abasic nucleotide
nacauggcuuccagauaugccu

SEQ ID NO: 1826 - RNA, 23 nt, Artificial Sequence
  source: /note="Description of Artificial Sequence: Synthetic oligonucleotide"
aggcauaucuggaagccauguuu

SEQ ID NO: 1827 - RNA, 22 nt, Artificial Sequence
  source: /note="Description of Artificial Sequence: Synthetic oligonucleotide"
  modified_base (1)..(1): Inverted abasic nucleotide
ncaacguacccuucauugaugu

SEQ ID NO: 1828 - RNA, 23 nt, Artificial Sequence
  source: /note="Description of Artificial Sequence: Synthetic oligonucleotide"
acaucaaugaaggguacguuguu

SEQ ID NO: 1829 - RNA, 22 nt, Artificial Sequence
  source: /note="Description of Artificial Sequence: Synthetic oligonucleotide"
  modified_base (1)..(1): Inverted abasic nucleotide
ncaacguacccuucauugaugu

SEQ ID NO: 1830 - RNA, 23 nt, Artificial Sequence
  source: /note="Description of Artificial Sequence: Synthetic oligonucleotide"
acaucaaugaaggguacguuguu

SEQ ID NO: 1831 - RNA, 22 nt, Artificial Sequence
  source: /note="Description of Artificial Sequence: Synthetic oligonucleotide"
  modified_base (1)..(1): Inverted abasic nucleotide
nacguacccuucauugauguuu

SEQ ID NO: 1832 - RNA, 21 nt, Artificial Sequence
  source: /note="Description of Artificial Sequence: Synthetic oligonucleotide"
acaucaaugaaggguacguuu

SEQ ID NO: 1833 - RNA, 21 nt, Artificial Sequence
  source: /note="Description of Artificial Sequence: Synthetic oligonucleotide"
  modified_base (21)..(21): Inverted abasic nucleotide
cugcuucaugccuuucuacan

SEQ ID NO: 1834 - RNA, 23 nt, Artificial Sequence
  source: /note="Description of Artificial Sequence: Synthetic oligonucleotide"
auguagaaaggcaugaagcaguu

SEQ ID NO: 1835 - RNA, 22 nt, Artificial Sequence
  source: /note="Description of Artificial Sequence: Synthetic oligonucleotide"
  modified_base (1)..(1): Inverted abasic nucleotide
ncugcuucaugccuuucuacau

SEQ ID NO: 1836 - RNA, 23 nt, Artificial Sequence
  source: /note="Description of Artificial Sequence: Synthetic oligonucleotide"
auguagaaaggcaugaagcaguu

SEQ ID NO: 1837 - RNA, 22 nt, Artificial Sequence
  source: /note="Description of Artificial Sequence: Synthetic oligonucleotide"
  modified_base (1)..(1): Inverted abasic nucleotide
ngcuucaugccuuucuacauuu

SEQ ID NO: 1838 - RNA, 21 nt, Artificial Sequence
  source: /note="Description of Artificial Sequence: Synthetic oligonucleotide"
auguagaaaggcaugaagcuu

SEQ ID NO: 1839 - RNA, 21 nt, Artificial Sequence
  source: /note="Description of Artificial Sequence: Synthetic oligonucleotide"
  modified_base (21)..(21): Inverted abasic nucleotide
cugcuucaugccuuucuacan

SEQ ID NO: 1840 - RNA, 23 nt, Artificial Sequence
  source: /note="Description of Artificial Sequence: Synthetic oligonucleotide"
auguagaaaggcaugaagcaguu

SEQ ID NO: 1841 - RNA, 22 nt, Artificial Sequence
  source: /note="Description of Artificial Sequence: Synthetic oligonucleotide"
  modified_base (1)..(1): Inverted abasic nucleotide
ncugcuucaugccuuucuacau

SEQ ID NO: 1842 - RNA, 23 nt, Artificial Sequence
  source: /note="Description of Artificial Sequence: Synthetic oligonucleotide"
auguagaaaggcaugaagcaguu

SEQ ID NO: 1843 - RNA, 21 nt, Artificial Sequence
  source: /note="Description of Artificial Sequence: Synthetic oligonucleotide"
  modified_base (21)..(21): Inverted abasic nucleotide
cugcuucaugccuuucuacan

SEQ ID NO: 1844 - RNA, 23 nt, Artificial Sequence
  source: /note="Description of Artificial Sequence: Synthetic oligonucleotide"
auguagaaaggcaugaagcaguu

SEQ ID NO: 1845 - RNA, 22 nt, Artificial Sequence
  source: /note="Description of Artificial Sequence: Synthetic oligonucleotide"
  modified_base (1)..(1): Inverted abasic nucleotide
  modified_base (22)..(22): Inverted abasic nucleotide
ncugcuucaugccuuucuacan

SEQ ID NO: 1846 - RNA, 23 nt, Artificial Sequence
  source: /note="Description of Artificial Sequence: Synthetic oligonucleotide"
auguagaaaggcaugaagcaguu

SEQ ID NO: 1847 - RNA, 22 nt, Artificial Sequence
  source: /note="Description of Artificial Sequence: Synthetic oligonucleotide"
  modified_base (1)..(1): Inverted abasic nucleotide
ngcuucaugccuuucuacauuu

SEQ ID NO: 1848 - RNA, 21 nt, Artificial Sequence
  source: /note="Description of Artificial Sequence: Synthetic oligonucleotide"
auguagaaaggcaugaagcuu

SEQ ID NO: 1849 - RNA, 22 nt, Artificial Sequence
  source: /note="Description of Artificial Sequence: Synthetic oligonucleotide"
  modified_base (1)..(1): Inverted abasic nucleotide
ncuucaugccuuucuacaguuu

SEQ ID NO: 1850 - RNA, 21 nt, Artificial Sequence
  source: /note="Description of Artificial Sequence: Synthetic oligonucleotide"
acuguagaaaggcaugaaguu

SEQ ID NO: 1851 - RNA, 21 nt, Artificial Sequence
  source: /note="Description of Artificial Sequence: Synthetic oligonucleotide"
  modified_base (21)..(21): Inverted abasic nucleotide
ugcuucaugccuuucuacagn

SEQ ID NO: 1852 - RNA, 23 nt, Artificial Sequence
  source: /note="Description of Artificial Sequence: Synthetic oligonucleotide"
acuguagaaaggcaugaagcauu

SEQ ID NO: 1853 - RNA, 22 nt, Artificial Sequence
  source: /note="Description of Artificial Sequence: Synthetic oligonucleotide"
  modified_base (1)..(1): Inverted abasic nucleotide
ncugcuucaugccuuucuacau

SEQ ID NO: 1854 - RNA, 23 nt, Artificial Sequence
  source: /note="Description of Artificial Sequence: Synthetic oligonucleotide"
auguagaaaggcaugaagcaguu

SEQ ID NO: 1855 - RNA, 21 nt, Artificial Sequence
  source: /note="Description of Artificial Sequence: Synthetic oligonucleotide"
  modified_base (21)..(21): Inverted abasic nucleotide
cugcuucaugccuuucuacan

SEQ ID NO: 1856 - RNA, 23 nt, Artificial Sequence
  source: /note="Description of Artificial Sequence: Synthetic oligonucleotide"
auguagaaaggcaugaagcaguu

SEQ ID NO: 1857 - RNA, 21 nt, Artificial Sequence
  source: /note="Description of Artificial Sequence: Synthetic oligonucleotide"
  modified_base (21)..(21): Inverted abasic nucleotide
cugcuucaugccuuucuacan

SEQ ID NO: 1858 - RNA, 23 nt, Artificial Sequence
  source: /note="Description of Artificial Sequence: Synthetic oligonucleotide"
auguagaaaggcaugaagcaguu

SEQ ID NO: 1859 - RNA, 22 nt, Artificial Sequence
  source: /note="Description of Artificial Sequence: Synthetic oligonucleotide"
  modified_base (1)..(1): Inverted abasic nucleotide
ncuucaucccuuucuacaguuu

SEQ ID NO: 1860 - RNA, 21 nt, Artificial Sequence
  source: /note="Description of Artificial Sequence: Synthetic oligonucleotide"
acuguagaaagggaugaaguu

SEQ ID NO: 1861 - RNA, 22 nt, Artificial Sequence
  source: /note="Description of Artificial Sequence: Synthetic oligonucleotide"
  modified_base (1)..(1): Inverted abasic nucleotide
ngcuucaucccuuucuacauuu

SEQ ID NO: 1862 - RNA, 21 nt, Artificial Sequence
  source: /note="Description of Artificial Sequence: Synthetic oligonucleotide"
auguagaaagggaugaagcuu

SEQ ID NO: 1863 - RNA, 21 nt, Artificial Sequence
  source: /note="Description of Artificial Sequence: Synthetic oligonucleotide"
  modified_base (21)..(21): Inverted abasic nucleotide
ugcuucaucccuuucuacagn

SEQ ID NO: 1864 - RNA, 23 nt, Artificial Sequence
  source: /note="Description of Artificial Sequence: Synthetic oligonucleotide"
acuguagaaagggaugaagcauu

SEQ ID NO: 1865 - RNA, 21 nt, Artificial Sequence
  source: /note="Description of Artificial Sequence: Synthetic oligonucleotide"
  modified_base (21)..(21): Inverted abasic nucleotide
cugcuucaucccuuucuacan

SEQ ID NO: 1866 - RNA, 23 nt, Artificial Sequence
  source: /note="Description of Artificial Sequence: Synthetic oligonucleotide"
auguagaaagggaugaagcaguu

SEQ ID NO: 1867 - RNA, 22 nt, Artificial Sequence
  source: /note="Description of Artificial Sequence: Synthetic oligonucleotide"
  modified_base (1)..(1): Inverted abasic nucleotide
nacauugcucuuucaccugauu

SEQ ID NO: 1868 - RNA, 21 nt, Artificial Sequence
  source: /note="Description of Artificial Sequence: Synthetic oligonucleotide"
ucaggugaaagagcaauguuu

SEQ ID NO: 1869 - RNA, 21 nt, Artificial Sequence
  source: /note="Description of Artificial Sequence: Synthetic oligonucleotide"
  modified_base (21)..(21): Inverted abasic nucleotide
cugcuucaugccuuucuacan

SEQ ID NO: 1870 - RNA, 23 nt, Artificial Sequence
  source: /note="Description of Artificial Sequence: Synthetic oligonucleotide"
auguagaaaggcaugaagcaguu

SEQ ID NO: 1871 - RNA, 21 nt, Artificial Sequence
  source: /note="Description of Artificial Sequence: Synthetic oligonucleotide"
  modified_base (21)..(21): Inverted abasic nucleotide
cugcuucaugccuuucuacan

SEQ ID NO: 1872 - RNA, 23 nt, Artificial Sequence
  source: /note="Description of Artificial Sequence: Synthetic oligonucleotide"
auguagaaaggcaugaagcaguu

SEQ ID NO: 1873 - RNA, 21 nt, Artificial Sequence
  source: /note="Description of Artificial Sequence: Synthetic oligonucleotide"
  modified_base (21)..(21): Inverted abasic nucleotide
cugcuucaugccuuucuacan

SEQ ID NO: 1874 - RNA, 23 nt, Artificial Sequence
  source: /note="Description of Artificial Sequence: Synthetic oligonucleotide"
auguagaaaggcaugaagcaguu

SEQ ID NO: 1875 - RNA, 21 nt, Artificial Sequence
  source: /note="Description of Artificial Sequence: Synthetic oligonucleotide"
  modified_base (21)..(21): Inverted abasic nucleotide
cugcuucaugccuuucuacan

SEQ ID NO: 1876 - RNA, 23 nt, Artificial Sequence
  source: /note="Description of Artificial Sequence: Synthetic oligonucleotide"
auguagaaaggcaugaagcaguu

SEQ ID NO: 1877 - RNA, 21 nt, Artificial Sequence
  source: /note="Description of Artificial Sequence: Synthetic oligonucleotide"
  modified_base (21)..(21): Inverted abasic nucleotide
cugcuucaugccuuucuacan

SEQ ID NO: 1878 - RNA, 23 nt, Artificial Sequence
  source: /note="Description of Artificial Sequence: Synthetic oligonucleotide"
auguagaaaggcaugaagcaguu

SEQ ID NO: 1879 - RNA, 21 nt, Artificial Sequence
  source: /note="Description of Artificial Sequence: Synthetic oligonucleotide"
  modified_base (21)..(21): Inverted abasic nucleotide
cugcuucaugccuuucuacan

SEQ ID NO: 1880 - RNA, 23 nt, Artificial Sequence
  source: /note="Description of Artificial Sequence: Synthetic oligonucleotide"
auguagaaaggcaugaagcaguu

SEQ ID NO: 1881 - RNA, 21 nt, Artificial Sequence
  source: /note="Description of Artificial Sequence: Synthetic oligonucleotide"
  modified_base (21)..(21): Inverted abasic nucleotide
cugcuucaugccuuucuacan

SEQ ID NO: 1882 - RNA, 23 nt, Artificial Sequence
  source: /note="Description of Artificial Sequence: Synthetic oligonucleotide"
auguagaaaggcaugaagcaguu

SEQ ID NO: 1883 - RNA, 21 nt, Artificial Sequence
  source: /note="Description of Artificial Sequence: Synthetic oligonucleotide"
  modified_base (21)..(21): Inverted abasic nucleotide
cugcuucaugccuuucuacan

SEQ ID NO: 1884 - RNA, 23 nt, Artificial Sequence
  source: /note="Description of Artificial Sequence: Synthetic oligonucleotide"
auguagaaaggcaugaagcaguu

SEQ ID NO: 1885 - RNA, 21 nt, Artificial Sequence
  source: /note="Description of Artificial Sequence: Synthetic oligonucleotide"
  modified_base (21)..(21): Inverted abasic nucleotide
cugcuucaugccuuucuacan

SEQ ID NO: 1886 - RNA, 23 nt, Artificial Sequence
  source: /note="Description of Artificial Sequence: Synthetic oligonucleotide"
auguagaaaggcaugaagcaguu

SEQ ID NO: 1887 - RNA, 21 nt, Artificial Sequence
  source: /note="Description of Artificial Sequence: Synthetic oligonucleotide"
  modified_base (21)..(21): Inverted abasic nucleotide
cugcuucaugccuuucuacan

SEQ ID NO: 1888 - RNA, 23 nt, Artificial Sequence
  source: /note="Description of Artificial Sequence: Synthetic oligonucleotide"
auguagaaaggcaugaagcaguu

SEQ ID NO: 1889 - RNA, 21 nt, Artificial Sequence
  source: /note="Description of Artificial Sequence: Synthetic oligonucleotide"
  modified_base (21)..(21): Inverted abasic nucleotide
cugcuucaugccuuucuacan

SEQ ID NO: 1890 - RNA, 23 nt, Artificial Sequence
  source: /note="Description of Artificial Sequence: Synthetic oligonucleotide"
auguagaaaggcaugaagcaguu

SEQ ID NO: 1891 - DNA, 22 bp, Artificial Sequence
  source: /note="Description of Artificial Sequence: Synthetic oligonucleotide"
  source: /note="Description of Combined DNA/RNA Molecule: Synthetic oligonucleotide"
  modified_base (1)..(1): Inverted abasic nucleotide
ncuucaugcctuucuacaguuu

SEQ ID NO: 1892 - RNA, 21 nt, Artificial Sequence
  source: /note="Description of Artificial Sequence: Synthetic oligonucleotide"
acuguagaaaggcaugaaguu

SEQ ID NO: 1893 - RNA, 22 nt, Artificial Sequence
  source: /note="Description of Artificial Sequence: Synthetic oligonucleotide"
  modified_base (1)..(1): Inverted abasic nucleotide
ncuucaugccuuucuacaguuu

SEQ ID NO: 1894 - RNA, 21 nt, Artificial Sequence
  source: /note="Description of Artificial Sequence: Synthetic oligonucleotide"
acuguagaaaggcaugaaguu

SEQ ID NO: 1895 - RNA, 22 nt, Artificial Sequence
  source: /note="Description of Artificial Sequence: Synthetic oligonucleotide"
  modified_base (1)..(1): Inverted abasic nucleotide
ncuucaugccuuucuacaguuu

SEQ ID NO: 1896 - RNA, 21 nt, Artificial Sequence
  source: /note="Description of Artificial Sequence: Synthetic oligonucleotide"
acuguagaaaggcaugaaguu

SEQ ID NO: 1897 - RNA, 22 nt, Artificial Sequence
  source: /note="Description of Artificial Sequence: Synthetic oligonucleotide"
  modified_base (1)..(1): Inverted abasic nucleotide
ncuucaugccuuucuacaguuu

SEQ ID NO: 1898 - RNA, 21 nt, Artificial Sequence
  source: /note="Description of Artificial Sequence: Synthetic oligonucleotide"
acuguagaaaggcaugaaguu

SEQ ID NO: 1899 - RNA, 22 nt, Artificial Sequence
  source: /note="Description of Artificial Sequence: Synthetic oligonucleotide"
  modified_base (1)..(1): Inverted abasic nucleotide
ncuucaugccuuucuacaguuu

SEQ ID NO: 1900 - RNA, 21 nt, Artificial Sequence
  source: /note="Description of Artificial Sequence: Synthetic oligonucleotide"
acuguagaaaggcaugaaguu

SEQ ID NO: 1901 - DNA, 22 bp, Artificial Sequence
  source: /note="Description of Artificial Sequence: Synthetic oligonucleotide"
  source: /note="Description of Combined DNA/RNA Molecule: Synthetic oligonucleotide"
  modified_base (1)..(1): Inverted abasic nucleotide
ncuucaugccuuucuacaguuu

SEQ ID NO: 1902 - RNA, 21 nt, Artificial Sequence
  source: /note="Description of Artificial Sequence: Synthetic oligonucleotide"
acuguagaaaggcaugaaguu

SEQ ID NO: 1903 - DNA, 22 bp, Artificial Sequence
  source: /note="Description of Artificial Sequence: Synthetic oligonucleotide"
  source: /note="Description of Combined DNA/RNA Molecule: Synthetic oligonucleotide"
  modified_base (1)..(1): Inverted abasic nucleotide
ncuucaugccutucuacaguuu

SEQ ID NO: 1904 - RNA, 21 nt, Artificial Sequence
  source: /note="Description of Artificial Sequence: Synthetic oligonucleotide"
acuguagaaaggcaugaaguu

SEQ ID NO: 1905 - RNA, 22 nt, Artificial Sequence
  source: /note="Description of Artificial Sequence: Synthetic oligonucleotide"
  modified_base (1)..(1): Inverted abasic nucleotide
ngcuucaugggauucuacauuu

SEQ ID NO: 1906 - RNA, 21 nt, Artificial Sequence
  source: /note="Description of Artificial Sequence: Synthetic oligonucleotide"
auguagaaucccaugaagcuu

SEQ ID NO: 1907 - RNA, 22 nt, Artificial Sequence
  source: /note="Description of Artificial Sequence: Synthetic oligonucleotide"
  modified_base (1)..(1): Inverted abasic nucleotide
ncuucaugcgaaucuacaguuu

SEQ ID NO: 1908 - RNA, 21 nt, Artificial Sequence
  source: /note="Description of Artificial Sequence: Synthetic oligonucleotide"
acuguagauucgcaugaaguu

SEQ ID NO: 1909 - RNA, 21 nt, Artificial Sequence
  source: /note="Description of Artificial Sequence: Synthetic oligonucleotide"
  modified_base (21)..(21): Inverted abasic nucleotide
cugcuucaugccuuucuacan

SEQ ID NO: 1910 - RNA, 23 nt, Artificial Sequence
  source: /note="Description of Artificial Sequence: Synthetic oligonucleotide"
uuguagaaaggcaugaagcaguu

SEQ ID NO: 1911 - RNA, 22 nt, Artificial Sequence
  source: /note="Description of Artificial Sequence: Synthetic oligonucleotide"
  modified_base (1)..(1): Inverted abasic nucleotide
ncugcuucaugccuuucuacaa

SEQ ID NO: 1912 - RNA, 23 nt, Artificial Sequence
  source: /note="Description of Artificial Sequence: Synthetic oligonucleotide"
uuguagaaaggcaugaagcaguu

SEQ ID NO: 1913 - DNA, 21 bp, Artificial Sequence
  source: /note="Description of Artificial Sequence: Synthetic oligonucleotide"
  source: /note="Description of Combined DNA/RNA Molecule: Synthetic oligonucleotide"
cugcuucaugccuuucuacaa

SEQ ID NO: 1914 - RNA, 23 nt, Artificial Sequence
  source: /note="Description of Artificial Sequence: Synthetic oligonucleotide"
uuguagaaaggcaugaagcaguu

SEQ ID NO: 1915 - RNA, 21 nt, Artificial Sequence
  source: /note="Description of Artificial Sequence: Synthetic oligonucleotide"
  modified_base (21)..(21): Inverted abasic nucleotide
cugcuucaugggauucuacan

SEQ ID NO: 1916 - RNA, 23 nt, Artificial Sequence
  source: /note="Description of Artificial Sequence: Synthetic oligonucleotide"
auguagaaucccaugaagcaguu

SEQ ID NO: 1917 - RNA, 22 nt, Artificial Sequence
  source: /note="Description of Artificial Sequence: Synthetic oligonucleotide"
  modified_base (1)..(1): Inverted abasic nucleotide
ncugcuucaugggauucuacau

SEQ ID NO: 1918 - RNA, 23 nt, Artificial Sequence
  source: /note="Description of Artificial Sequence: Synthetic oligonucleotide"
auguagaaucccaugaagcaguu

SEQ ID NO: 1919 - RNA, 22 nt, Artificial Sequence
  source: /note="Description of Artificial Sequence: Synthetic oligonucleotide"
  modified_base (1)..(1): Inverted abasic nucleotide
ncuucaugccuuucuacaguuu

SEQ ID NO: 1920 - RNA, 21 nt, Artificial Sequence
  source: /note="Description of Artificial Sequence: Synthetic oligonucleotide"
acuguagaaaggcaugaaguu

SEQ ID NO: 1921 - RNA, 22 nt, Artificial Sequence
  source: /note="Description of Artificial Sequence: Synthetic oligonucleotide"
  modified_base (1)..(1): Inverted abasic nucleotide
ncuucaugccuuucuacaguuu

SEQ ID NO: 1922 - RNA, 21 nt, Artificial Sequence
  source: /note="Description of Artificial Sequence: Synthetic oligonucleotide"
acuguagaaaggcaugaaguu

SEQ ID NO: 1923 - RNA, 22 nt, Artificial Sequence
  source: /note="Description of Artificial Sequence: Synthetic oligonucleotide"
  modified_base (1)..(1): Inverted abasic nucleotide
ngcuucaugccuuucuacauuu

SEQ ID NO: 1924 - RNA, 21 nt, Artificial Sequence
  source: /note="Description of Artificial Sequence: Synthetic oligonucleotide"
auguagaaaggcaugaagcuu

SEQ ID NO: 1925 - RNA, 22 nt, Artificial Sequence
  source: /note="Description of Artificial Sequence: Synthetic oligonucleotide"
  modified_base (1)..(1): Inverted abasic nucleotide
  modified_base (22)..(22): Inverted abasic nucleotide
nugcuucaugccuuucuacagn

SEQ ID NO: 1926 - RNA, 23 nt, Artificial Sequence
  source: /note="Description of Artificial Sequence: Synthetic oligonucleotide"
acuguagaaaggcaugaagcauu

SEQ ID NO: 1927 - RNA, 22 nt, Artificial Sequence
  source: /note="Description of Artificial Sequence: Synthetic oligonucleotide"
  modified_base (1)..(1): Inverted abasic nucleotide
ncuucaugccuuucuacaguuu

SEQ ID NO: 1928 - RNA, 21 nt, Artificial Sequence
  source: /note="Description of Artificial Sequence: Synthetic oligonucleotide"
acuguagaaaggcaugaaguu

SEQ ID NO: 1929 - RNA, 21 nt, Artificial Sequence
  source: /note="Description of Artificial Sequence: Synthetic oligonucleotide"
  modified_base (21)..(21): Inverted abasic nucleotide
ugcuucaugccuuucuacagn

SEQ ID NO: 1930 - RNA, 23 nt, Artificial Sequence
  source: /note="Description of Artificial Sequence: Synthetic oligonucleotide"
acuguagaaaggcaugaagcauu

SEQ ID NO: 1931 - RNA, 21 nt, Artificial Sequence
  source: /note="Description of Artificial Sequence: Synthetic oligonucleotide"
  modified_base (21)..(21): Inverted abasic nucleotide
ugcuucaugccuuucuacagn

SEQ ID NO: 1932 - RNA, 23 nt, Artificial Sequence
  source: /note="Description of Artificial Sequence: Synthetic oligonucleotide"
acuguagaaaggcaugaagcauu

SEQ ID NO: 1933 - RNA, 21 nt, Artificial Sequence
  source: /note="Description of Artificial Sequence: Synthetic oligonucleotide"
  modified_base (21)..(21): Inverted abasic nucleotide
ugcuucaugccuuucuacagn

SEQ ID NO: 1934 - RNA, 23 nt, Artificial Sequence
  source: /note="Description of Artificial Sequence: Synthetic oligonucleotide"
acuguagaaaggcaugaagcauu

SEQ ID NO: 1935 - RNA, 22 nt, Artificial Sequence
  source: /note="Description of Artificial Sequence: Synthetic oligonucleotide"
  modified_base (1)..(1): Inverted abasic nucleotide
ncuucaugccuuucuacaguuu

SEQ ID NO: 1936 - RNA, 21 nt, Artificial Sequence
  source: /note="Description of Artificial Sequence: Synthetic oligonucleotide"
acuguagaaaggcaugaaguu

SEQ ID NO: 1937 - RNA, 21 nt, Artificial Sequence
  source: /note="Description of Artificial Sequence: Synthetic oligonucleotide"
  modified_base (21)..(21): Inverted abasic nucleotide
ugcuucaugccuuucuacagn

SEQ ID NO: 1938 - RNA, 23 nt, Artificial Sequence
  source: /note="Description of Artificial Sequence: Synthetic oligonucleotide"
acuguagaaaggcaugaagcauu

SEQ ID NO: 1939 - RNA, 21 nt, Artificial Sequence
  source: /note="Description of Artificial Sequence: Synthetic oligonucleotide"
  modified_base (21)..(21): Inverted abasic nucleotide
augccuuucuacaguggcuun

SEQ ID NO: 1940 - RNA, 23 nt, Artificial Sequence
  source: /note="Description of Artificial Sequence: Synthetic oligonucleotide"
agccacuguagaaaggcaugauu

SEQ ID NO: 1941 - RNA, 21 nt, Artificial Sequence
  source: /note="Description of Artificial Sequence: Synthetic oligonucleotide"
  modified_base (21)..(21): Inverted abasic nucleotide
ucaugccuuucuacaguggcn

SEQ ID NO: 1942 - RNA, 23 nt, Artificial Sequence
  source: /note="Description of Artificial Sequence: Synthetic oligonucleotide"
agccacuguagaaaggcaugauu

SEQ ID NO: 1943 - RNA, 22 nt, Artificial Sequence
  source: /note="Description of Artificial Sequence: Synthetic oligonucleotide"
  modified_base (1)..(1): Inverted abasic nucleotide
naugccuuucuacaguggcuuu

SEQ ID NO: 1944 - RNA, 21 nt, Artificial Sequence
  source: /note="Description of Artificial Sequence: Synthetic oligonucleotide"
agccacuguagaaaggcauuu

SEQ ID NO: 1945 - RNA, 22 nt, Artificial Sequence
  source: /note="Description of Artificial Sequence: Synthetic oligonucleotide"
  modified_base (1)..(1): Inverted abasic nucleotide
naugccuuucuacaguggcuuu

SEQ ID NO: 1946 - RNA, 21 nt, Artificial Sequence
  source: /note="Description of Artificial Sequence: Synthetic oligonucleotide"
agccacuguagaaaggcauuu

SEQ ID NO: 1947 - RNA, 22 nt, Artificial Sequence
  source: /note="Description of Artificial Sequence: Synthetic oligonucleotide"
  modified_base (1)..(1): Inverted abasic nucleotide
nucaugccuuucuacaguggcu

SEQ ID NO: 1948 - RNA, 23 nt, Artificial Sequence
  source: /note="Description of Artificial Sequence: Synthetic oligonucleotide"
agccacuguagaaaggcaugauu

SEQ ID NO: 1949 - RNA, 21 nt, Artificial Sequence
  source: /note="Description of Artificial Sequence: Synthetic oligonucleotide"
  modified_base (21)..(21): Inverted abasic nucleotide
ucaugccuuucuacaguggcn

SEQ ID NO: 1950 - RNA, 23 nt, Artificial Sequence
  source: /note="Description of Artificial Sequence: Synthetic oligonucleotide"
agccacuguagaaaggcaugauu

SEQ ID NO: 1951 - RNA, 22 nt, Artificial Sequence
  source: /note="Description of Artificial Sequence: Synthetic oligonucleotide"
  modified_base (1)..(1): Inverted abasic nucleotide
naugccuuucuacaguggcuuu

SEQ ID NO: 1952 - RNA, 21 nt, Artificial Sequence
  source: /note="Description of Artificial Sequence: Synthetic oligonucleotide"
agccacuguagaaaggcauuu

SEQ ID NO: 1953 - RNA, 21 nt, Artificial Sequence
  source: /note="Description of Artificial Sequence: Synthetic oligonucleotide"
  modified_base (21)..(21): Inverted abasic nucleotide
ucaugccuuucuacaguggcn

SEQ ID NO: 1954 - RNA, 23 nt, Artificial Sequence
  source: /note="Description of Artificial Sequence: Synthetic oligonucleotide"
agccacuguagaaaggcaugauu

SEQ ID NO: 1955 - RNA, 21 nt, Artificial Sequence
  source: /note="Description of Artificial Sequence: Synthetic oligonucleotide"
  modified_base (21)..(21): Inverted abasic nucleotide
ucaugccuuucuacaguggcn

SEQ ID NO: 1956 - RNA, 23 nt, Artificial Sequence
  source: /note="Description of Artificial Sequence: Synthetic oligonucleotide"
agccacuguagaaaggcaugauu

SEQ ID NO: 1957 - RNA, 22 nt, Artificial Sequence
  source: /note="Description of Artificial Sequence: Synthetic oligonucleotide"
  modified_base (1)..(1): Inverted abasic nucleotide
  modified_base (22)..(22): Inverted abasic nucleotide
nucaugccuuucuacaguggcn

SEQ ID NO: 1958 - RNA, 23 nt, Artificial Sequence
  source: /note="Description of Artificial Sequence: Synthetic oligonucleotide"
agccacuguagaaaggcaugauu

SEQ ID NO: 1959 - RNA, 22 nt, Artificial Sequence
  source: /note="Description of Artificial Sequence: Synthetic oligonucleotide"
  modified_base (1)..(1): Inverted abasic nucleotide
naugccuuucuacaguggcauu

SEQ ID NO: 1960 - RNA, 21 nt, Artificial Sequence
  source: /note="Description of Artificial Sequence: Synthetic oligonucleotide"
ugccacuguagaaaggcauuu

SEQ ID NO: 1961 - RNA, 21 nt, Artificial Sequence
  source: /note="Description of Artificial Sequence: Synthetic oligonucleotide"
  modified_base (21)..(21): Inverted abasic nucleotide
ucaugccuuucuacaguggcn

SEQ ID NO: 1962 - RNA, 23 nt, Artificial Sequence
  source: /note="Description of Artificial Sequence: Synthetic oligonucleotide"
ugccacuguagaaaggcaugauu

SEQ ID NO: 1963 - RNA, 22 nt, Artificial Sequence
  source: /note="Description of Artificial Sequence: Synthetic oligonucleotide"
  modified_base (1)..(1): Inverted abasic nucleotide
nucaugccuuucuacaguggca

SEQ ID NO: 1964 - RNA, 23 nt, Artificial Sequence
  source: /note="Description of Artificial Sequence: Synthetic oligonucleotide"
ugccacuguagaaaggcaugauu

SEQ ID NO: 1965 - DNA, 21 bp, Artificial Sequence
  source: /note="Description of Artificial Sequence: Synthetic oligonucleotide"
  source: /note="Description of Combined DNA/RNA Molecule: Synthetic oligonucleotide"
ucaugccuuucuacaguggca

SEQ ID NO: 1966 - RNA, 23 nt, Artificial Sequence
  source: /note="Description of Artificial Sequence: Synthetic oligonucleotide"
ugccacuguagaaaggcaugauu

SEQ ID NO: 1967 - RNA, 21 nt, Artificial Sequence
  source: /note="Description of Artificial Sequence: Synthetic oligonucleotide"
  modified_base (21)..(21): Inverted abasic nucleotide
cugcuucaugccuuucuacan

SEQ ID NO: 1968 - RNA, 23 nt, Artificial Sequence
  source: /note="Description of Artificial Sequence: Synthetic oligonucleotide"
auguagaaaggcaugaagcaguu

SEQ ID NO: 1969 - RNA, 21 nt, Artificial Sequence
  source: /note="Description of Artificial Sequence: Synthetic oligonucleotide"
  modified_base (21)..(21): Inverted abasic nucleotide
cugcuucaugccuuucuacan

SEQ ID NO: 1970 - RNA, 23 nt, Artificial Sequence
  source: /note="Description of Artificial Sequence: Synthetic oligonucleotide"
uuguagaaaggcaugaagcaguu

SEQ ID NO: 1971 - DNA, 21 bp, Artificial Sequence
  source: /note="Description of Artificial Sequence: Synthetic oligonucleotide"
  source: /note="Description of Combined DNA/RNA Molecule: Synthetic oligonucleotide"
cugcuucaugccuuucuacaa

SEQ ID NO: 1972 - RNA, 23 nt, Artificial Sequence
  source: /note="Description of Artificial Sequence: Synthetic oligonucleotide"
uuguagaaaggcaugaagcaguu

SEQ ID NO: 1973 - RNA, 21 nt, Artificial Sequence
  source: /note="Description of Artificial Sequence: Synthetic oligonucleotide"
  modified_base (21)..(21): Inverted abasic nucleotide
ucaugccuuucuacaguggcn

SEQ ID NO: 1974 - RNA, 23 nt, Artificial Sequence
  source: /note="Description of Artificial Sequence: Synthetic oligonucleotide"
ugccacuguagaaaggcaugauu

SEQ ID NO: 1975 - DNA, 21 bp, Artificial Sequence
  source: /note="Description of Artificial Sequence: Synthetic oligonucleotide"
  source: /note="Description of Combined DNA/RNA Molecule: Synthetic oligonucleotide"
ucaugccuuucuacaguggca

SEQ ID NO: 1976 - RNA, 23 nt, Artificial Sequence
  source: /note="Description of Artificial Sequence: Synthetic oligonucleotide"
ugccacuguagaaaggcaugauu

SEQ ID NO: 1977 - RNA, 22 nt, Artificial Sequence
  source: /note="Description of Artificial Sequence: Synthetic oligonucleotide"
  modified_base (1)..(1): Inverted abasic nucleotide
ncuucaugccuuucuacaguuu

SEQ ID NO: 1978 - RNA, 21 nt, Artificial Sequence
  source: /note="Description of Artificial Sequence: Synthetic oligonucleotide"
acuguagaaaggcaugaaguu

SEQ ID NO: 1979 - RNA, 21 nt, Artificial Sequence
  source: /note="Description of Artificial Sequence: Synthetic oligonucleotide"
  modified_base (21)..(21): Inverted abasic nucleotide
cugcuucaugccuuucuacan

SEQ ID NO: 1980 - RNA, 23 nt, Artificial Sequence
  source: /note="Description of Artificial Sequence: Synthetic oligonucleotide"
  modified_base (6)..(6): Abasic nucleotide
auguanaaaggcaugaagcaguu

SEQ ID NO: 1981 - RNA, 21 nt, Artificial Sequence
  source: /note="Description of Artificial Sequence: Synthetic oligonucleotide"
  modified_base (21)..(21): Inverted abasic nucleotide
cugcuucaugccuuucuacan

SEQ ID NO: 1982 - RNA, 23 nt, Artificial Sequence
  source: /note="Description of Artificial Sequence: Synthetic oligonucleotide"
  modified_base (6)..(6): Abasic nucleotide
auguanaaaggcaugaagcaguu

SEQ ID NO: 1983 - RNA, 21 nt, Artificial Sequence
  source: /note="Description of Artificial Sequence: Synthetic oligonucleotide"
  modified_base (21)..(21): Inverted abasic nucleotide
ugcuucaugccuuucuacagn

SEQ ID NO: 1984 - RNA, 23 nt, Artificial Sequence
  source: /note="Description of Artificial Sequence: Synthetic oligonucleotide"
  modified_base (6)..(6): Abasic nucleotide
acugungaaaggcaugaagcauu

SEQ ID NO: 1985 - RNA, 21 nt, Artificial Sequence
  source: /note="Description of Artificial Sequence: Synthetic oligonucleotide"
  modified_base (21)..(21): Inverted abasic nucleotide
ugcuucaugccuuucuacagn

SEQ ID NO: 1986 - RNA, 23 nt, Artificial Sequence
  source: /note="Description of Artificial Sequence: Synthetic oligonucleotide"
  modified_base (6)..(6): Abasic nucleotide
acugungaaaggcaugaagcauu

SEQ ID NO: 1987 - RNA, 21 nt, Artificial Sequence
  source: /note="Description of Artificial Sequence: Synthetic oligonucleotide"
  modified_base (21)..(21): Inverted abasic nucleotide
ucaugccuuucuacaguggcn

SEQ ID NO: 1988 - RNA, 23 nt, Artificial Sequence
  source: /note="Description of Artificial Sequence: Synthetic oligonucleotide"
  modified_base (6)..(6): Abasic nucleotide
agccanuguagaaaggcaugauu

SEQ ID NO: 1989 - RNA, 21 nt, Artificial Sequence
  source: /note="Description of Artificial Sequence: Synthetic oligonucleotide"
  modified_base (21)..(21): Inverted abasic nucleotide
ucaugccuuucuacaguggcn

SEQ ID NO: 1990 - RNA, 23 nt, Artificial Sequence
  source: /note="Description of Artificial Sequence: Synthetic oligonucleotide"
  modified_base (6)..(6): Abasic nucleotide
agccanuguagaaaggcaugauu

SEQ ID NO: 1991 - RNA, 21 nt, Artificial Sequence
  source: /note="Description of Artificial Sequence: Synthetic oligonucleotide"
  modified_base (21)..(21): Inverted abasic nucleotide
cugcuucaugccuuucuacan

SEQ ID NO: 1992 - RNA, 23 nt, Artificial Sequence
  source: /note="Description of Artificial Sequence: Synthetic oligonucleotide"
auguagaaaggcaugaagcaguu

SEQ ID NO: 1993 - RNA, 21 nt, Artificial Sequence
  source: /note="Description of Artificial Sequence: Synthetic oligonucleotide"
  modified_base (21)..(21): Inverted abasic nucleotide
cugcuucaugccuuucuacan

SEQ ID NO: 1994 - RNA, 23 nt, Artificial Sequence
  source: /note="Description of Artificial Sequence: Synthetic oligonucleotide"
auguagaaaggcaugaagcaguu

SEQ ID NO: 1995 - RNA, 21 nt, Artificial Sequence
  source: /note="Description of Artificial Sequence: Synthetic oligonucleotide"
  modified_base (21)..(21): Inverted abasic nucleotide
cugcuucaugccuuucuacan

SEQ ID NO: 1996 - RNA, 23 nt, Artificial Sequence
  source: /note="Description of Artificial Sequence: Synthetic oligonucleotide"
auguagaaaggcaugaagcaguu

SEQ ID NO: 1997 - RNA, 21 nt, Artificial Sequence
  source: /note="Description of Artificial Sequence: Synthetic oligonucleotide"
  modified_base (21)..(21): Inverted abasic nucleotide
cugcuucaugccuuucuacan

SEQ ID NO: 1998 - RNA, 23 nt, Artificial Sequence
  source: /note="Description of Artificial Sequence: Synthetic oligonucleotide"
auguagaaaggcaugaagcaguu

SEQ ID NO: 1999 - RNA, 21 nt, Artificial Sequence
  source: /note="Description of Artificial Sequence: Synthetic oligonucleotide"
  modified_base (21)..(21): Inverted abasic nucleotide
cugcuucaugccuuucuacan

SEQ ID NO: 2000 - RNA, 23 nt, Artificial Sequence
  source: /note="Description of Artificial Sequence: Synthetic oligonucleotide"
auguagaaaggcaugaagcaguu

SEQ ID NO: 2001 - RNA, 21 nt, Artificial Sequence
  source: /note="Description of Artificial Sequence: Synthetic oligonucleotide"
  modified_base (21)..(21): Inverted abasic nucleotide
cugcuucaugccuuucuacan

SEQ ID NO: 2002 - RNA, 23 nt, Artificial Sequence
  source: /note="Description of Artificial Sequence: Synthetic oligonucleotide"
auguagaaaggcaugaagcaguu

SEQ ID NO: 2003 - RNA, 21 nt, Artificial Sequence
  source: /note="Description of Artificial Sequence: Synthetic oligonucleotide"
  modified_base (21)..(21): Inverted abasic nucleotide
cugcuucaugccuuucuacan

SEQ ID NO: 2004 - RNA, 23 nt, Artificial Sequence
  source: /note="Description of Artificial Sequence: Synthetic oligonucleotide"
auguagaaaggcaugaagcaguu

SEQ ID NO: 2005 - RNA, 22 nt, Artificial Sequence
  source: /note="Description of Artificial Sequence: Synthetic oligonucleotide"
  modified_base (1)..(1): Inverted abasic nucleotide
ncugcuucaugccuuucuacau

SEQ ID NO: 2006 - RNA, 23 nt, Artificial Sequence
  source: /note="Description of Artificial Sequence: Synthetic oligonucleotide"
auguagaaaggcaugaagcaguu

SEQ ID NO: 2007 - RNA, 22 nt, Artificial Sequence
  source: /note="Description of Artificial Sequence: Synthetic oligonucleotide"
  modified_base (1)..(1): Inverted abasic nucleotide
  modified_base (22)..(22): Inverted abasic nucleotide
ncugcuucaugccuuucuacan

SEQ ID NO: 2008 - RNA, 23 nt, Artificial Sequence
  source: /note="Description of Artificial Sequence: Synthetic oligonucleotide"
auguagaaaggcaugaagcaguu

SEQ ID NO: 2009 - RNA, 21 nt, Artificial Sequence
  source: /note="Description of Artificial Sequence: Synthetic oligonucleotide"
  modified_base (21)..(21): Inverted abasic nucleotide
cugcuucaugccuuucuacan

SEQ ID NO: 2010 - RNA, 23 nt, Artificial Sequence
  source: /note="Description of Artificial Sequence: Synthetic oligonucleotide"
auguagaaaggcaugaagcaguu

SEQ ID NO: 2011 - RNA, 21 nt, Artificial Sequence
  source: /note="Description of Artificial Sequence: Synthetic oligonucleotide"
  modified_base (21)..(21): Inverted abasic nucleotide
cugcuucaugccuuucuacan

SEQ ID NO: 2012 - RNA, 23 nt, Artificial Sequence
  source: /note="Description of Artificial Sequence: Synthetic oligonucleotide"
auguagaaaggcaugaagcaguu

SEQ ID NO: 2013 - RNA, 22 nt, Artificial Sequence
  source: /note="Description of Artificial Sequence: Synthetic oligonucleotide"
  modified_base (1)..(1): Inverted abasic nucleotide
ncugcuucaugccuuucuacau

SEQ ID NO: 2014 - RNA, 23 nt, Artificial Sequence
  source: /note="Description of Artificial Sequence: Synthetic oligonucleotide"
auguagaaaggcaugaagcaguu

SEQ ID NO: 2015 - RNA, 21 nt, Artificial Sequence
  source: /note="Description of Artificial Sequence: Synthetic oligonucleotide"
  modified_base (21)..(21): Inverted abasic nucleotide
cugcuucaugccuuucuacan

SEQ ID NO: 2016 - RNA, 23 nt, Artificial Sequence
  source: /note="Description of Artificial Sequence: Synthetic oligonucleotide"
auguagaaaggcaugaagcaguu

SEQ ID NO: 2017 - RNA, 21 nt, Artificial Sequence
  source: /note="Description of Artificial Sequence: Synthetic oligonucleotide"
  modified_base (21)..(21): Inverted abasic nucleotide
cugcuucaugccuuucuacan

SEQ ID NO: 2018 - RNA, 23 nt, Artificial Sequence
  source: /note="Description of Artificial Sequence: Synthetic oligonucleotide"
auguagaaaggcaugaagcaguu

SEQ ID NO: 2019 - RNA, 22 nt, Artificial Sequence
  source: /note="Description of Artificial Sequence: Synthetic oligonucleotide"
  modified_base (1)..(1): Inverted abasic nucleotide
ncugcuucaugccuuucuacau

SEQ ID NO: 2020 - RNA, 23 nt, Artificial Sequence
  source: /note="Description of Artificial Sequence: Synthetic oligonucleotide"
auguagaaaggcaugaagcaguu

SEQ ID NO: 2021 - RNA, 22 nt, Artificial Sequence
  source: /note="Description of Artificial Sequence: Synthetic oligonucleotide"
  modified_base (1)..(1): Inverted abasic nucleotide
  modified_base (22)..(22): Inverted abasic nucleotide
ncugcuucaugccuuucuacan

SEQ ID NO: 2022 - RNA, 23 nt, Artificial Sequence
  source: /note="Description of Artificial Sequence: Synthetic oligonucleotide"
auguagaaaggcaugaagcaguu

SEQ ID NO: 2023 - RNA, 21 nt, Artificial Sequence
  source: /note="Description of Artificial Sequence: Synthetic oligonucleotide"
  modified_base (21)..(21): Inverted abasic nucleotide
cugcuucaugccuuucuacan

SEQ ID NO: 2024 - RNA, 23 nt, Artificial Sequence
  source: /note="Description of Artificial Sequence: Synthetic oligonucleotide"
  modified_base (2)..(2): Abasic nucleotide
anguagaaaggcaugaagcaguu

SEQ ID NO: 2025 - RNA, 21 nt, Artificial Sequence
  source: /note="Description of Artificial Sequence: Synthetic oligonucleotide"
  modified_base (21)..(21): Inverted abasic nucleotide
cugcuucaugccuuucuacan

SEQ ID NO: 2026 - RNA, 23 nt, Artificial Sequence
  source: /note="Description of Artificial Sequence: Synthetic oligonucleotide"
  modified_base (3)..(3): Abasic nucleotide
aunuagaaaggcaugaagcaguu

SEQ ID NO: 2027 - RNA, 21 nt, Artificial Sequence
  source: /note="Description of Artificial Sequence: Synthetic oligonucleotide"
  modified_base (21)..(21): Inverted abasic nucleotide
cugcuucaugccuuucuacan

SEQ ID NO: 2028 - RNA, 23 nt, Artificial Sequence
  source: /note="Description of Artificial Sequence: Synthetic oligonucleotide"
  modified_base (4)..(4): Abasic nucleotide
augnagaaaggcaugaagcaguu

SEQ ID NO: 2029 - RNA, 21 nt, Artificial Sequence
  source: /note="Description of Artificial Sequence: Synthetic oligonucleotide"
  modified_base (21)..(21): Inverted abasic nucleotide
cugcuucaugccuuucuacan

SEQ ID NO: 2030 - RNA, 23 nt, Artificial Sequence
  source: /note="Description of Artificial Sequence: Synthetic oligonucleotide"
  modified_base (5)..(5): Abasic nucleotide
augungaaaggcaugaagcaguu

SEQ ID NO: 2031 - RNA, 21 nt, Artificial Sequence
  source: /note="Description of Artificial Sequence: Synthetic oligonucleotide"
  modified_base (21)..(21): Inverted abasic nucleotide
cugcuucaugccuuucuacan

SEQ ID NO: 2032 - RNA, 23 nt, Artificial Sequence
  source: /note="Description of Artificial Sequence: Synthetic oligonucleotide"
  modified_base (7)..(7): Abasic nucleotide
auguagnaaggcaugaagcaguu

SEQ ID NO: 2033 - RNA, 21 nt, Artificial Sequence
  source: /note="Description of Artificial Sequence: Synthetic oligonucleotide"
  modified_base (21)..(21): Inverted abasic nucleotide
cugcuucaugccuuucuacan

SEQ ID NO: 2034 - RNA, 23 nt, Artificial Sequence
  source: /note="Description of Artificial Sequence: Synthetic oligonucleotide"
  modified_base (8)..(8): Abasic nucleotide
auguaganaggcaugaagcaguu

SEQ ID NO: 2035 - RNA, 21 nt, Artificial Sequence
  source: /note="Description of Artificial Sequence: Synthetic oligonucleotide"
  modified_base (21)..(21): Inverted abasic nucleotide
caacguacccuucauugaugn

SEQ ID NO: 2036 - RNA, 23 nt, Artificial Sequence
  source: /note="Description of Artificial Sequence: Synthetic oligonucleotide"
acaucaaugaaggguacguuguu

SEQ ID NO: 2037 - RNA, 21 nt, Artificial Sequence
  source: /note="Description of Artificial Sequence: Synthetic oligonucleotide"
  modified_base (21)..(21): Inverted abasic nucleotide
caacguacccuucauugaugn

SEQ ID NO: 2038 - RNA, 23 nt, Artificial Sequence
  source: /note="Description of Artificial Sequence: Synthetic oligonucleotide"
acaucaaugaaggguacguuguu

SEQ ID NO: 2039 - RNA, 21 nt, Artificial Sequence
  source: /note="Description of Artificial Sequence: Synthetic oligonucleotide"
  modified_base (21)..(21): Inverted abasic nucleotide
acauggcuuccagauaugccn

SEQ ID NO: 2040 - RNA, 23 nt, Artificial Sequence
  source: /note="Description of Artificial Sequence: Synthetic oligonucleotide"
aggcauaucuggaagccauguuu

SEQ ID NO: 2041 - RNA, 21 nt, Artificial Sequence
  source: /note="Description of Artificial Sequence: Synthetic oligonucleotide"
  modified_base (21)..(21): Inverted abasic nucleotide
acauggcuuccagauaugccn

SEQ ID NO: 2042 - RNA, 23 nt, Artificial Sequence
  source: /note="Description of Artificial Sequence: Synthetic oligonucleotide"
aggcauaucuggaagccauguuu

SEQ ID NO: 2043 - RNA, 21 nt, Artificial Sequence
  source: /note="Description of Artificial Sequence: Synthetic oligonucleotide"
  modified_base (21)..(21): Inverted abasic nucleotide
cugcuucaugccuuucuacan

SEQ ID NO: 2044 - RNA, 23 nt, Artificial Sequence
  source: /note="Description of Artificial Sequence: Synthetic oligonucleotide"
auguagaaaggcaugaagcaguu

SEQ ID NO: 2045 - RNA, 21 nt, Artificial Sequence
  source: /note="Description of Artificial Sequence: Synthetic oligonucleotide"
  modified_base (21)..(21): Inverted abasic nucleotide
cugcuucaugccuuucuacan

SEQ ID NO: 2046 - RNA, 23 nt, Artificial Sequence
  source: /note="Description of Artificial Sequence: Synthetic oligonucleotide"
auguagaaaggcaugaagcaguu

SEQ ID NO: 2047 - RNA, 21 nt, Artificial Sequence
  source: /note="Description of Artificial Sequence: Synthetic oligonucleotide"
  modified_base (21)..(21): Inverted abasic nucleotide
cugcuucaugccuuucuacan

SEQ ID NO: 2048 - RNA, 23 nt, Artificial Sequence
  source: /note="Description of Artificial Sequence: Synthetic oligonucleotide"
auguagaaaggcaugaagcaguu

SEQ ID NO: 2049 - RNA, 21 nt, Artificial Sequence
  source: /note="Description of Artificial Sequence: Synthetic oligonucleotide"
  modified_base (21)..(21): Inverted abasic nucleotide
cugcggcuuccugggcuucun

SEQ ID NO: 2050 - RNA, 23 nt, Artificial Sequence
  source: /note="Description of Artificial Sequence: Synthetic oligonucleotide"
uagaagcccaggaagccgcaguu

SEQ ID NO: 2051 - RNA, 21 nt, Artificial Sequence
  source: /note="Description of Artificial Sequence: Synthetic oligonucleotide"
  modified_base (21)..(21): Inverted abasic nucleotide
cugcggcuuccugggcuucun

SEQ ID NO: 2052 - RNA, 23 nt, Artificial Sequence
  source: /note="Description of Artificial Sequence: Synthetic oligonucleotide"
uagaagcccaggaagccgcaguu

SEQ ID NO: 2053 - RNA, 21 nt, Artificial Sequence
  source: /note="Description of Artificial Sequence: Synthetic oligonucleotide"
  modified_base (21)..(21): Inverted abasic nucleotide
ugcuucaugccuuucuacagn

SEQ ID NO: 2054 - RNA, 23 nt, Artificial Sequence
  source: /note="Description of Artificial Sequence: Synthetic oligonucleotide"
acuguagaaaggcaugaagcauu

SEQ ID NO: 2055 - RNA, 22 nt, Artificial Sequence
  source: /note="Description of Artificial Sequence: Synthetic oligonucleotide"
  modified_base (1)..(1): Inverted abasic nucleotide
nugcuucaugccuuucuacagu

SEQ ID NO: 2056 - RNA, 23 nt, Artificial Sequence
  source: /note="Description of Artificial Sequence: Synthetic oligonucleotide"
acuguagaaaggcaugaagcauu

SEQ ID NO: 2057 - RNA, 22 nt, Artificial Sequence
  source: /note="Description of Artificial Sequence: Synthetic oligonucleotide"
  modified_base (1)..(1): Inverted abasic nucleotide
  modified_base (22)..(22): Inverted abasic nucleotide
nugcuucaugccuuucuacagn

SEQ ID NO: 2058 - RNA, 23 nt, Artificial Sequence
  source: /note="Description of Artificial Sequence: Synthetic oligonucleotide"
acuguagaaaggcaugaagcauu

SEQ ID NO: 2059 - RNA, 21 nt, Artificial Sequence
  source: /note="Description of Artificial Sequence: Synthetic oligonucleotide"
  modified_base (21)..(21): Inverted abasic nucleotide
ugcuucaugccuuucuacagn

SEQ ID NO: 2060 - RNA, 23 nt, Artificial Sequence
  source: /note="Description of Artificial Sequence: Synthetic oligonucleotide"
acuguagaaaggcaugaagcauu

SEQ ID NO: 2061 - RNA, 21 nt, Artificial Sequence
  source: /note="Description of Artificial Sequence: Synthetic oligonucleotide"
  modified_base (21)..(21): Inverted abasic nucleotide
ugcuucaugccuuucuacagn

SEQ ID NO: 2062 - RNA, 23 nt, Artificial Sequence
  source: /note="Description of Artificial Sequence: Synthetic oligonucleotide"
acuguagaaaggcaugaagcauu

SEQ ID NO: 2063 - RNA, 21 nt, Artificial Sequence
  source: /note="Description of Artificial Sequence: Synthetic oligonucleotide"
  modified_base (21)..(21): Inverted abasic nucleotide
ugcuucaugccuuucuacagn

SEQ ID NO: 2064 - RNA, 23 nt, Artificial Sequence
  source: /note="Description of Artificial Sequence: Synthetic oligonucleotide"
acuguagaaaggcaugaagcauu

SEQ ID NO: 2065 - RNA, 21 nt, Artificial Sequence
  source: /note="Description of Artificial Sequence: Synthetic oligonucleotide"
cugcuucaugccuuucuacau

SEQ ID NO: 2066 - RNA, 23 nt, Artificial Sequence
  source: /note="Description of Artificial Sequence: Synthetic oligonucleotide"
auguagaaaggcaugaagcaguu

SEQ ID NO: 2067 - RNA, 21 nt, Artificial Sequence
  source: /note="Description of Artificial Sequence: Synthetic oligonucleotide"
cugcuucaugccuuucuacau

SEQ ID NO: 2068 - RNA, 23 nt, Artificial Sequence
  source: /note="Description of Artificial Sequence: Synthetic oligonucleotide"
auguagaaaggcaugaagcaguu

SEQ ID NO: 2069 - RNA, 21 nt, Artificial Sequence
  source: /note="Description of Artificial Sequence: Synthetic oligonucleotide"
cugcuucaugccuuucuacau

SEQ ID NO: 2070 - RNA, 23 nt, Artificial Sequence
  source: /note="Description of Artificial Sequence: Synthetic oligonucleotide"
auguagaaaggcaugaagcaguu

SEQ ID NO: 2071 - RNA, 21 nt, Artificial Sequence
  source: /note="Description of Artificial Sequence: Synthetic oligonucleotide"
  modified_base (21)..(21): Inverted abasic nucleotide
ugcuucaugccuuucuacagn

SEQ ID NO: 2072 - RNA, 23 nt, Artificial Sequence
  source: /note="Description of Artificial Sequence: Synthetic oligonucleotide"
ucuguagaaaggcaugaagcauu

SEQ ID NO: 2073 - DNA, 21 bp, Artificial Sequence
  source: /note="Description of Artificial Sequence: Synthetic oligonucleotide"
  source: /note="Description of Combined DNA/RNA Molecule: Synthetic oligonucleotide"
ugcuucaugccuuucuacaga

SEQ ID NO: 2074 - RNA, 23 nt, Artificial Sequence
  source: /note="Description of Artificial Sequence: Synthetic oligonucleotide"
ucuguagaaaggcaugaagcauu

SEQ ID NO: 2075 - DNA, 21 bp, Artificial Sequence
  source: /note="Description of Artificial Sequence: Synthetic oligonucleotide"
  source: /note="Description of Combined DNA/RNA Molecule: Synthetic oligonucleotide"
cugcuucaugccuuucuacat

SEQ ID NO: 2076 - RNA, 23 nt, Artificial Sequence
  source: /note="Description of Artificial Sequence: Synthetic oligonucleotide"
auguagaaaggcaugaagcaguu

SEQ ID NO: 2077 - RNA, 21 nt, Artificial Sequence
  source: /note="Description of Artificial Sequence: Synthetic oligonucleotide"
  modified_base (21)..(21): Inverted abasic nucleotide
cugcuucaugccuuucuacan

SEQ ID NO: 2078 - RNA, 23 nt, Artificial Sequence
  source: /note="Description of Artificial Sequence: Synthetic oligonucleotide"
auguagaaaggcaugaagcaguu

SEQ ID NO: 2079 - RNA, 21 nt, Artificial Sequence
  source: /note="Description of Artificial Sequence: Synthetic oligonucleotide"
  modified_base (21)..(21): Inverted abasic nucleotide
cugcuucaugccuuucuacan

SEQ ID NO: 2080 - RNA, 23 nt, Artificial Sequence
  source: /note="Description of Artificial Sequence: Synthetic oligonucleotide"
auguagaaaggcaugaagcaguu

SEQ ID NO: 2081 - RNA, 21 nt, Artificial Sequence
  source: /note="Description of Artificial Sequence: Synthetic oligonucleotide"
  modified_base (21)..(21): Inverted abasic nucleotide
cugcuucaugccuuucuacan

SEQ ID NO: 2082 - RNA, 23 nt, Artificial Sequence
  source: /note="Description of Artificial Sequence: Synthetic oligonucleotide"
auguagaaaggcaugaagcaguu

SEQ ID NO: 2083 - RNA, 21 nt, Artificial Sequence
  source: /note="Description of Artificial Sequence: Synthetic oligonucleotide"
  modified_base (21)..(21): Inverted abasic nucleotide
cugcuucaugccuuucuacan

SEQ ID NO: 2084 - RNA, 23 nt, Artificial Sequence
  source: /note="Description of Artificial Sequence: Synthetic oligonucleotide"
auguagaaaggcaugaagcaguu

SEQ ID NO: 2085 - RNA, 21 nt, Artificial Sequence
  source: /note="Description of Artificial Sequence: Synthetic oligonucleotide"
  modified_base (21)..(21): Inverted abasic nucleotide
cugcuucaugccuuucuacan

SEQ ID NO: 2086 - RNA, 23 nt, Artificial Sequence
  source: /note="Description of Artificial Sequence: Synthetic oligonucleotide"
auguagaaaggcaugaagcaguu

SEQ ID NO: 2087 - RNA, 21 nt, Artificial Sequence
  source: /note="Description of Artificial Sequence: Synthetic oligonucleotide"
  modified_base (21)..(21): Inverted abasic nucleotide
cugcuucaugccuuucuacan

SEQ ID NO: 2088 - RNA, 23 nt, Artificial Sequence
  source: /note="Description of Artificial Sequence: Synthetic oligonucleotide"
auguagaaaggcaugaagcaguu

SEQ ID NO: 2089 - RNA, 21 nt, Artificial Sequence
  source: /note="Description of Artificial Sequence: Synthetic oligonucleotide"
  modified_base (21)..(21): Inverted abasic nucleotide
cugcuucaugccuuucuacan

SEQ ID NO: 2090 - RNA, 23 nt, Artificial Sequence
  source: /note="Description of Artificial Sequence: Synthetic oligonucleotide"
auguagaaaggcaugaagcaguu

SEQ ID NO: 2091 - RNA, 21 nt, Artificial Sequence
  source: /note="Description of Artificial Sequence: Synthetic oligonucleotide"
  modified_base (21)..(21): Inverted abasic nucleotide
cugcuucaugccuuucuacan

SEQ ID NO: 2092 - RNA, 23 nt, Artificial Sequence
  source: /note="Description of Artificial Sequence: Synthetic oligonucleotide"
auguagaaaggcaugaagcaguu

SEQ ID NO: 2093 - RNA, 21 nt, Artificial Sequence
  source: /note="Description of Artificial Sequence: Synthetic oligonucleotide"
  modified_base (21)..(21): Inverted abasic nucleotide
cugcuucaugccuuucuacan

SEQ ID NO: 2094 - RNA, 23 nt, Artificial Sequence
  source: /note="Description of Artificial Sequence: Synthetic oligonucleotide"
auguagaaaggcaugaagcaguu

SEQ ID NO: 2095 - RNA, 21 nt, Artificial Sequence
  source: /note="Description of Artificial Sequence: Synthetic oligonucleotide"
  modified_base (21)..(21): Inverted abasic nucleotide
cugcuucaugccuuucuacan

SEQ ID NO: 2096 - RNA, 23 nt, Artificial Sequence
  source: /note="Description of Artificial Sequence: Synthetic oligonucleotide"
auguagaaaggcaugaagcaguu

SEQ ID NO: 2097 - RNA, 21 nt, Artificial Sequence
  source: /note="Description of Artificial Sequence: Synthetic oligonucleotide"
  modified_base (21)..(21): Inverted abasic nucleotide
cugcuucaugccuuucuacan

SEQ ID NO: 2098 - RNA, 23 nt, Artificial Sequence
  source: /note="Description of Artificial Sequence: Synthetic oligonucleotide"
auguagaaaggcaugaagcaguu

SEQ ID NO: 2099 - RNA, 21 nt, Artificial Sequence
  source: /note="Description of Artificial Sequence: Synthetic oligonucleotide"
  modified_base (21)..(21): Inverted abasic nucleotide
cugcuucaugccuuucuacan

SEQ ID NO: 2100 - RNA, 23 nt, Artificial Sequence
  source: /note="Description of Artificial Sequence: Synthetic oligonucleotide"
auguagaaaggcaugaagcaguu

SEQ ID NO: 2101 - RNA, 21 nt, Artificial Sequence
  source: /note="Description of Artificial Sequence: Synthetic oligonucleotide"
  modified_base (21)..(21): Inverted abasic nucleotide
cugcuucaugccuuucuacan

SEQ ID NO: 2102 - RNA, 23 nt, Artificial Sequence
  source: /note="Description of Artificial Sequence: Synthetic oligonucleotide"
auguagaaaggcaugaagcaguu

SEQ ID NO: 2103 - RNA, 21 nt, Artificial Sequence
  source: /note="Description of Artificial Sequence: Synthetic oligonucleotide"
  modified_base (21)..(21): Inverted abasic nucleotide
cugcuucaugccuuucuacan

SEQ ID NO: 2104 - RNA, 23 nt, Artificial Sequence
  source: /note="Description of Artificial Sequence: Synthetic oligonucleotide"
auguagaaaggcaugaagcaguu

SEQ ID NO: 2105 - RNA, 21 nt, Artificial Sequence
  source: /note="Description of Artificial Sequence: Synthetic oligonucleotide"
  modified_base (21)..(21): Inverted abasic nucleotide
cugcuucaugccuuucuacan

SEQ ID NO: 2106 - RNA, 23 nt, Artificial Sequence
  source: /note="Description of Artificial Sequence: Synthetic oligonucleotide"
auguagaaaggcaugaagcaguu

SEQ ID NO: 2107 - RNA, 21 nt, Artificial Sequence
  source: /note="Description of Artificial Sequence: Synthetic oligonucleotide"
  modified_base (21)..(21): Inverted abasic nucleotide
cugcuucaugccuuucuacan

SEQ ID NO: 2108 - RNA, 23 nt, Artificial Sequence
  source: /note="Description of Artificial Sequence: Synthetic oligonucleotide"
auguagaaaggcaugaagcaguu

SEQ ID NO: 2109 - RNA, 21 nt, Artificial Sequence
  source: /note="Description of Artificial Sequence: Synthetic oligonucleotide"
  modified_base (21)..(21): Inverted abasic nucleotide
cugcuucaugccuuucuacan

SEQ ID NO: 2110 - RNA, 23 nt, Artificial Sequence
  source: /note="Description of Artificial Sequence: Synthetic oligonucleotide"
auguagaaaggcaugaagcaguu

SEQ ID NO: 2111 - RNA, 21 nt, Artificial Sequence
  source: /note="Description of Artificial Sequence: Synthetic oligonucleotide"
  modified_base (21)..(21): Inverted abasic nucleotide
cugcuucaugccuuucuacan

SEQ ID NO: 2112 - DNA, 23 bp, Artificial Sequence
  source: /note="Description of Artificial Sequence: Synthetic oligonucleotide"
  source: /note="Description of Combined DNA/RNA Molecule: Synthetic oligonucleotide"
auguagaaaggcaugaagcaguu

SEQ ID NO: 2113 - RNA, 21 nt, Artificial Sequence
  source: /note="Description of Artificial Sequence: Synthetic oligonucleotide"
  modified_base (21)..(21): Inverted abasic nucleotide
cugcuucaugccuuucuacan

SEQ ID NO: 2114 - DNA, 23 bp, Artificial Sequence
  source: /note="Description of Artificial Sequence: Synthetic oligonucleotide"
  source: /note="Description of Combined DNA/RNA Molecule: Synthetic oligonucleotide"
auguagaaaggcaugaagcaguu

SEQ ID NO: 2115 - RNA, 21 nt, Artificial Sequence
  source: /note="Description of Artificial Sequence: Synthetic oligonucleotide"
  modified_base (21)..(21): Inverted abasic nucleotide
cugcuucaugccuuucuacan

SEQ ID NO: 2116 - DNA, 23 bp, Artificial Sequence
  source: /note="Description of Artificial Sequence: Synthetic oligonucleotide"
  source: /note="Description of Combined DNA/RNA Molecule: Synthetic oligonucleotide"
auguagaaaggcaugaagcaguu

SEQ ID NO: 2117 - RNA, 21 nt, Artificial Sequence
  source: /note="Description of Artificial Sequence: Synthetic oligonucleotide"
  modified_base (21)..(21): Inverted abasic nucleotide
cugcuucaugccuuucuacan

SEQ ID NO: 2118 - RNA, 23 nt, Artificial Sequence
  source: /note="Description of Artificial Sequence: Synthetic oligonucleotide"
auguagaaaggcaugaagcaguu

SEQ ID NO: 2119 - RNA, 21 nt, Artificial Sequence
  source: /note="Description of Artificial Sequence: Synthetic oligonucleotide"
  modified_base (21)..(21): Inverted abasic nucleotide
cugcuucaugccuuucuacan

SEQ ID NO: 2120 - RNA, 23 nt, Artificial Sequence
  source: /note="Description of Artificial Sequence: Synthetic oligonucleotide"
auguagaaaggcaugaagcaguu

SEQ ID NO: 2121 - RNA, 21 nt, Artificial Sequence
  source: /note="Description of Artificial Sequence: Synthetic oligonucleotide"
  modified_base (21)..(21): Inverted abasic nucleotide
cugcuucaugccuuucuacan

SEQ ID NO: 2122 - RNA, 23 nt, Artificial Sequence
  source: /note="Description of Artificial Sequence: Synthetic oligonucleotide"
auguagaaaggcaugaagcaguu

SEQ ID NO: 2123 - RNA, 21 nt, Artificial Sequence
  source: /note="Description of Artificial Sequence: Synthetic oligonucleotide"
  modified_base (21)..(21): Inverted abasic nucleotide
cugcuucaugccuuucuacan

SEQ ID NO: 2124 - RNA, 23 nt, Artificial Sequence
  source: /note="Description of Artificial Sequence: Synthetic oligonucleotide"
auguagaaaggcaugaagcaguu

SEQ ID NO: 2125 - RNA, 21 nt, Artificial Sequence
  source: /note="Description of Artificial Sequence: Synthetic oligonucleotide"
  modified_base (21)..(21): Inverted abasic nucleotide
cugcuucaugccuuucuacan

SEQ ID NO: 2126 - RNA, 23 nt, Artificial Sequence
  source: /note="Description of Artificial Sequence: Synthetic oligonucleotide"
auguagaaaggcaugaagcaguu

SEQ ID NO: 2127 - RNA, 21 nt, Artificial Sequence
  source: /note="Description of Artificial Sequence: Synthetic oligonucleotide"
  modified_base (21)..(21): Inverted abasic nucleotide
cugcuucaugccuuucuacan

SEQ ID NO: 2128 - RNA, 23 nt, Artificial Sequence
  source: /note="Description of Artificial Sequence: Synthetic oligonucleotide"
auguagaaaggcaugaagcaguu

SEQ ID NO: 2129 - RNA, 21 nt, Artificial Sequence
  source: /note="Description of Artificial Sequence: Synthetic oligonucleotide"
  modified_base (21)..(21): Inverted abasic nucleotide
cugcuucaugccuuucuacan

SEQ ID NO: 2130 - RNA, 23 nt, Artificial Sequence
  source: /note="Description of Artificial Sequence: Synthetic oligonucleotide"
auguagaaaggcaugaagcaguu

SEQ ID NO: 2131 - DNA, 21 bp, Artificial Sequence
  source: /note="Description of Artificial Sequence: Synthetic oligonucleotide"
  source: /note="Description of Combined DNA/RNA Molecule: Synthetic oligonucleotide"
ugcuucaugccuuucuacaga

SEQ ID NO: 2132 - RNA, 23 nt, Artificial Sequence
  source: /note="Description of Artificial Sequence: Synthetic oligonucleotide"
ucuguagaaaggcaugaagcauu

SEQ ID NO: 2133 - DNA, 21 bp, Artificial Sequence
  source: /note="Description of Artificial Sequence: Synthetic oligonucleotide"
  source: /note="Description of Combined DNA/RNA Molecule: Synthetic oligonucleotide"
ugcuucaugccuuucuacaga

SEQ ID NO: 2134 - RNA, 23 nt, Artificial Sequence
  source: /note="Description of Artificial Sequence: Synthetic oligonucleotide"
ucuguagaaaggcaugaagcauu

SEQ ID NO: 2135 - DNA, 21 bp, Artificial Sequence
  source: /note="Description of Artificial Sequence: Synthetic oligonucleotide"
  source: /note="Description of Combined DNA/RNA Molecule: Synthetic oligonucleotide"
ugcuucaugccuuucuacaga

SEQ ID NO: 2136 - RNA, 23 nt, Artificial Sequence
  source: /note="Description of Artificial Sequence: Synthetic oligonucleotide"
ucuguagaaaggcaugaagcauu

SEQ ID NO: 2137 - DNA, 21 bp, Artificial Sequence
  source: /note="Description of Artificial Sequence: Synthetic oligonucleotide"
  source: /note="Description of Combined DNA/RNA Molecule: Synthetic oligonucleotide"
ugcuucaugccuuucuacaga

SEQ ID NO: 2138 - RNA, 23 nt, Artificial Sequence
  source: /note="Description of Artificial Sequence: Synthetic oligonucleotide"
ucuguagaaaggcaugaagcauu

SEQ ID NO: 2139 - DNA, 21 bp, Artificial Sequence
  source: /note="Description of Artificial Sequence: Synthetic oligonucleotide"
  source: /note="Description of Combined DNA/RNA Molecule: Synthetic oligonucleotide"
ugcuucaugccuuucuacaga

SEQ ID NO: 2140 - RNA, 23 nt, Artificial Sequence
  source: /note="Description of Artificial Sequence: Synthetic oligonucleotide"
ucuguagaaaggcaugaagcauu

SEQ ID NO: 2141 - DNA, 21 bp, Artificial Sequence
  source: /note="Description of Artificial Sequence: Synthetic oligonucleotide"
  source: /note="Description of Combined DNA/RNA Molecule: Synthetic oligonucleotide"
ugcuucaugccuuucuacaga

SEQ ID NO: 2142 - RNA, 23 nt, Artificial Sequence
  source: /note="Description of Artificial Sequence: Synthetic oligonucleotide"
  modified_base (2)..(2): Abasic nucleotide
unuguagaaaggcaugaagcauu

SEQ ID NO: 2143 - DNA, 21 bp, Artificial Sequence
  source: /note="Description of Artificial Sequence: Synthetic oligonucleotide"
  source: /note="Description of Combined DNA/RNA Molecule: Synthetic oligonucleotide"
ugcuucaugccuuucuacaga

SEQ ID NO: 2144 - RNA, 23 nt, Artificial Sequence
  source: /note="Description of Artificial Sequence: Synthetic oligonucleotide"
  modified_base (3)..(3): Abasic nucleotide
ucnguagaaaggcaugaagcauu

SEQ ID NO: 2145 - DNA, 21 bp, Artificial Sequence
  source: /note="Description of Artificial Sequence: Synthetic oligonucleotide"
  source: /note="Description of Combined DNA/RNA Molecule: Synthetic oligonucleotide"
ugcuucaugccuuucuacaga

SEQ ID NO: 2146 - RNA, 23 nt, Artificial Sequence
  source: /note="Description of Artificial Sequence: Synthetic oligonucleotide"
  modified_base (4)..(4): Abasic nucleotide
ucunuagaaaggcaugaagcauu

SEQ ID NO: 2147 - DNA, 21 bp, Artificial Sequence
  source: /note="Description of Artificial Sequence: Synthetic oligonucleotide"
  source: /note="Description of Combined DNA/RNA Molecule: Synthetic oligonucleotide"
ugcuucaugccuuucuacaga

SEQ ID NO: 2148 - RNA, 23 nt, Artificial Sequence
  source: /note="Description of Artificial Sequence: Synthetic oligonucleotide"
  modified_base (5)..(5): Abasic nucleotide
ucugnagaaaggcaugaagcauu

SEQ ID NO: 2149 - DNA, 21 bp, Artificial Sequence
  source: /note="Description of Artificial Sequence: Synthetic oligonucleotide"
  source: /note="Description of Combined DNA/RNA Molecule: Synthetic oligonucleotide"
ugcuucaugccuuucuacaga

SEQ ID NO: 2150 - RNA, 23 nt, Artificial Sequence
  source: /note="Description of Artificial Sequence: Synthetic oligonucleotide"
  modified_base (6)..(6): Abasic nucleotide
ucugungaaaggcaugaagcauu

SEQ ID NO: 2151 - DNA, 21 bp, Artificial Sequence
  source: /note="Description of Artificial Sequence: Synthetic oligonucleotide"
  source: /note="Description of Combined DNA/RNA Molecule: Synthetic oligonucleotide"
ugcuucaugccuuucuacaga

SEQ ID NO: 2152 - RNA, 23 nt, Artificial Sequence
  source: /note="Description of Artificial Sequence: Synthetic oligonucleotide"
  modified_base (7)..(7): Abasic nucleotide
ucuguanaaaggcaugaagcauu

SEQ ID NO: 2153 - DNA, 21 bp, Artificial Sequence
  source: /note="Description of Artificial Sequence: Synthetic oligonucleotide"
  source: /note="Description of Combined DNA/RNA Molecule: Synthetic oligonucleotide"
ugcuucaugccuuucuacaga

SEQ ID NO: 2154 - RNA, 23 nt, Artificial Sequence
  source: /note="Description of Artificial Sequence: Synthetic oligonucleotide"
  modified_base (8)..(8): Abasic nucleotide
ucuguagnaaggcaugaagcauu

SEQ ID NO: 2155 - DNA, 21 bp, Artificial Sequence
  source: /note="Description of Artificial Sequence: Synthetic oligonucleotide"
  source: /note="Description of Combined DNA/RNA Molecule: Synthetic oligonucleotide"
ucaugccuuucuacaguggct

SEQ ID NO: 2156 - RNA, 23 nt, Artificial Sequence
  source: /note="Description of Artificial Sequence: Synthetic oligonucleotide"
agccacuguagaaaggcaugauu

SEQ ID NO: 2157 - RNA, 21 nt, Artificial Sequence
  source: /note="Description of Artificial Sequence: Synthetic oligonucleotide"
  modified_base (21)..(21): Inverted abasic nucleotide
ucaugccuuucuacaguggcn

SEQ ID NO: 2158 - RNA, 23 nt, Artificial Sequence
  source: /note="Description of Artificial Sequence: Synthetic oligonucleotide"
ugccacuguagaaaggcaugauu

SEQ ID NO: 2159 - DNA, 21 bp, Artificial Sequence
  source: /note="Description of Artificial Sequence: Synthetic oligonucleotide"
  source: /note="Description of Combined DNA/RNA Molecule: Synthetic oligonucleotide"
ucaugccuuucuacaguggca

SEQ ID NO: 2160 - RNA, 23 nt, Artificial Sequence
  source: /note="Description of Artificial Sequence: Synthetic oligonucleotide"
ugccacuguagaaaggcaugauu

SEQ ID NO: 2161 - DNA, 21 bp, Artificial Sequence
  source: /note="Description of Artificial Sequence: Synthetic oligonucleotide"
  source: /note="Description of Combined DNA/RNA Molecule: Synthetic oligonucleotide"
uccugcuucaugccuuucuat

SEQ ID NO: 2162 - RNA, 23 nt, Artificial Sequence
  source: /note="Description of Artificial Sequence: Synthetic oligonucleotide"
auagaaaggcaugaagcaggauu

SEQ ID NO: 2163 - RNA, 21 nt, Artificial Sequence
  source: /note="Description of Artificial Sequence: Synthetic oligonucleotide"
  modified_base (21)..(21): Inverted abasic nucleotide
uccugcuucaugccuuucuan

SEQ ID NO: 2164 - RNA, 23 nt, Artificial Sequence
  source: /note="Description of Artificial Sequence: Synthetic oligonucleotide"
uuagaaaggcaugaagcaggauu

SEQ ID NO: 2165 - DNA, 21 bp, Artificial Sequence
  source: /note="Description of Artificial Sequence: Synthetic oligonucleotide"
  source: /note="Description of Combined DNA/RNA Molecule: Synthetic oligonucleotide"
uccugcuucaugccuuucuaa

SEQ ID NO: 2166 - RNA, 23 nt, Artificial Sequence
  source: /note="Description of Artificial Sequence: Synthetic oligonucleotide"
uuagaaaggcaugaagcaggauu

SEQ ID NO: 2167 - DNA, 21 bp, Artificial Sequence
  source: /note="Description of Artificial Sequence: Synthetic oligonucleotide"
  source: /note="Description of Combined DNA/RNA Molecule: Synthetic oligonucleotide"
uauguuccugcuucaugccut

SEQ ID NO: 2168 - RNA, 23 nt, Artificial Sequence
  source: /note="Description of Artificial Sequence: Synthetic oligonucleotide"
aaggcaugaagcaggaacauauu

SEQ ID NO: 2169 - RNA, 21 nt, Artificial Sequence
  source: /note="Description of Artificial Sequence: Synthetic oligonucleotide"
  modified_base (21)..(21): Inverted abasic nucleotide
uauguuccugcuucaugccun

SEQ ID NO: 2170 - RNA, 23 nt, Artificial Sequence
  source: /note="Description of Artificial Sequence: Synthetic oligonucleotide"
uaggcaugaagcaggaacauauu

SEQ ID NO: 2171 - DNA, 21 bp, Artificial Sequence
  source: /note="Description of Artificial Sequence: Synthetic oligonucleotide"
  source: /note="Description of Combined DNA/RNA Molecule: Synthetic oligonucleotide"
uauguuccugcuucaugccua

SEQ ID NO: 2172 - RNA, 23 nt, Artificial Sequence
  source: /note="Description of Artificial Sequence: Synthetic oligonucleotide"
uaggcaugaagcaggaacauauu

SEQ ID NO: 2173 - RNA, 21 nt, Artificial Sequence
  source: /note="Description of Artificial Sequence: Synthetic oligonucleotide"
  modified_base (21)..(21): Inverted abasic nucleotide
uccugcuucaugccuuucuan

SEQ ID NO: 2174 - RNA, 23 nt, Artificial Sequence
  source: /note="Description of Artificial Sequence: Synthetic oligonucleotide"
auagaaaggcaugaagcaggauu

SEQ ID NO: 2175 - RNA, 21 nt, Artificial Sequence
  source: /note="Description of Artificial Sequence: Synthetic oligonucleotide"
  modified_base (21)..(21): Inverted abasic nucleotide
uauguuccugcuucaugccun

SEQ ID NO: 2176 - RNA, 23 nt, Artificial Sequence
  source: /note="Description of Artificial Sequence: Synthetic oligonucleotide"
aaggcaugaagcaggaacauauu

SEQ ID NO: 2177 - DNA, 21 bp, Artificial Sequence
  source: /note="Description of Artificial Sequence: Synthetic oligonucleotide"
  source: /note="Description of Combined DNA/RNA Molecule: Synthetic oligonucleotide"
ucaugccuuucuacaguggct

SEQ ID NO: 2178 - RNA, 23 nt, Artificial Sequence
  source: /note="Description of Artificial Sequence: Synthetic oligonucleotide"
agccacuguagaaaggcaugauu

SEQ ID NO: 2179 - DNA, 21 bp, Artificial Sequence
  source: /note="Description of Artificial Sequence: Synthetic oligonucleotide"
  source: /note="Description of Combined DNA/RNA Molecule: Synthetic oligonucleotide"
uccugcuucaugccuuucuat

SEQ ID NO: 2180 - RNA, 23 nt, Artificial Sequence
  source: /note="Description of Artificial Sequence: Synthetic oligonucleotide"
auagaaaggcaugaagcaggauu

SEQ ID NO: 2181 - DNA, 21 bp, Artificial Sequence
  source: /note="Description of Artificial Sequence: Synthetic oligonucleotide"
  source: /note="Description of Combined DNA/RNA Molecule: Synthetic oligonucleotide"
uccugcuucaugccuuucuaa

SEQ ID NO: 2182 - RNA, 23 nt, Artificial Sequence
  source: /note="Description of Artificial Sequence: Synthetic oligonucleotide"
uuagaaaggcaugaagcaggauu

SEQ ID NO: 2183 - DNA, 21 bp, Artificial Sequence
  source: /note="Description of Artificial Sequence: Synthetic oligonucleotide"
  source: /note="Description of Combined DNA/RNA Molecule: Synthetic oligonucleotide"
uauguuccugcuucaugccua

SEQ ID NO: 2184 - RNA, 23 nt, Artificial Sequence
  source: /note="Description of Artificial Sequence: Synthetic oligonucleotide"
uaggcaugaagcaggaacauauu

SEQ ID NO: 2185 - DNA, 21 bp, Artificial Sequence
  source: /note="Description of Artificial Sequence: Synthetic oligonucleotide"
  source: /note="Description of Combined DNA/RNA Molecule: Synthetic oligonucleotide"
ugcuucaugccuuucuacaga

SEQ ID NO: 2186 - RNA, 23 nt, Artificial Sequence
  source: /note="Description of Artificial Sequence: Synthetic oligonucleotide"
ucuguagaaaggcaugaagcauu

SEQ ID NO: 2187 - RNA, 21 nt, Artificial Sequence
  source: /note="Description of Artificial Sequence: Synthetic oligonucleotide"
  modified_base (21)..(21): Inverted abasic nucleotide
cugcuucaugccuuucuacan

SEQ ID NO: 2188 - RNA, 23 nt, Artificial Sequence
  source: /note="Description of Artificial Sequence: Synthetic oligonucleotide"
auguagaaaggcaugaagcaguu

SEQ ID NO: 2189 - RNA, 21 nt, Artificial Sequence
  source: /note="Description of Artificial Sequence: Synthetic oligonucleotide"
  modified_base (21)..(21): Inverted abasic nucleotide
cugcuucaugccuuucuacan

SEQ ID NO: 2190 - RNA, 23 nt, Artificial Sequence
  source: /note="Description of Artificial Sequence: Synthetic oligonucleotide"
auguagaaaggcaugaagcaguu

SEQ ID NO: 2191 - RNA, 21 nt, Artificial Sequence
  source: /note="Description of Artificial Sequence: Synthetic oligonucleotide"
  modified_base (21)..(21): Inverted abasic nucleotide
cugcuucaugccuuucuacan

SEQ ID NO: 2192 - RNA, 23 nt, Artificial Sequence
  source: /note="Description of Artificial Sequence: Synthetic oligonucleotide"
auguagaaaggcaugaagcaguu

SEQ ID NO: 2193 - RNA, 21 nt, Artificial Sequence
  source: /note="Description of Artificial Sequence: Synthetic oligonucleotide"
  modified_base (21)..(21): Inverted abasic nucleotide
cugcuucaugccuuucuacan

SEQ ID NO: 2194 - RNA, 23 nt, Artificial Sequence
  source: /note="Description of Artificial Sequence: Synthetic oligonucleotide"
auguagaaaggcaugaagcaguu

SEQ ID NO: 2195 - RNA, 21 nt, Artificial Sequence
  source: /note="Description of Artificial Sequence: Synthetic oligonucleotide"
  modified_base (21)..(21): Inverted abasic nucleotide
cugcuucaugccuuucuacan

SEQ ID NO: 2196 - RNA, 23 nt, Artificial Sequence
  source: /note="Description of Artificial Sequence: Synthetic oligonucleotide"
auguagaaaggcaugaagcaguu

SEQ ID NO: 2197 - RNA, 21 nt, Artificial Sequence
  source: /note="Description of Artificial Sequence: Synthetic oligonucleotide"
  modified_base (21)..(21): Inverted abasic nucleotide
cugcuucaugccuuucuacan

SEQ ID NO: 2198 - RNA, 23 nt, Artificial Sequence
  source: /note="Description of Artificial Sequence: Synthetic oligonucleotide"
auguagaaaggcaugaagcaguu

SEQ ID NO: 2199 - RNA, 21 nt, Artificial Sequence
  source: /note="Description of Artificial Sequence: Synthetic oligonucleotide"
  modified_base (21)..(21): Inverted abasic nucleotide
cugcuucaugccuuucuacan

SEQ ID NO: 2200 - RNA, 23 nt, Artificial Sequence
  source: /note="Description of Artificial Sequence: Synthetic oligonucleotide"
auguagaaaggcaugaagcaguu

SEQ ID NO: 2201 - RNA, 21 nt, Artificial Sequence
  source: /note="Description of Artificial Sequence: Synthetic oligonucleotide"
  modified_base (21)..(21): Inverted abasic nucleotide
cugcuucaugccuuucuacan

SEQ ID NO: 2202 - RNA, 23 nt, Artificial Sequence
  source: /note="Description of Artificial Sequence: Synthetic oligonucleotide"
auguagaaaggcaugaagcaguu

SEQ ID NO: 2203 - RNA, 21 nt, Artificial Sequence
  source: /note="Description of Artificial Sequence: Synthetic oligonucleotide"
  modified_base (21)..(21): Inverted abasic nucleotide
cugcuucaugccuuucuacan

SEQ ID NO: 2204 - RNA, 23 nt, Artificial Sequence
  source: /note="Description of Artificial Sequence: Synthetic oligonucleotide"
auguagaaaggcaugaagcaguu

SEQ ID NO: 2205 - DNA, 21 bp, Artificial Sequence
  source: /note="Description of Artificial Sequence: Synthetic oligonucleotide"
  source: /note="Description of Combined DNA/RNA Molecule: Synthetic oligonucleotide"
  modified_base (21)..(21): Inverted abasic nucleotide
cugcuucaugccutucuacan

SEQ ID NO: 2206 - RNA, 23 nt, Artificial Sequence
  source: /note="Description of Artificial Sequence: Synthetic oligonucleotide"
auguagaaaggcaugaagcaguu

SEQ ID NO: 2207 - DNA, 21 bp, Artificial Sequence
  source: /note="Description of Artificial Sequence: Synthetic oligonucleotide"
  source: /note="Description of Combined DNA/RNA Molecule: Synthetic oligonucleotide"
  modified_base (21)..(21): Inverted abasic nucleotide
cugcuucaugcctuucuacan

SEQ ID NO: 2208 - RNA, 23 nt, Artificial Sequence
  source: /note="Description of Artificial Sequence: Synthetic oligonucleotide"
auguagaaaggcaugaagcaguu

SEQ ID NO: 2209 - DNA, 21 bp, Artificial Sequence
  source: /note="Description of Artificial Sequence: Synthetic oligonucleotide"
  source: /note="Description of Combined DNA/RNA Molecule: Synthetic oligonucleotide"
  modified_base (21)..(21): Inverted abasic nucleotide
cugcuucaugccuutcuacan

SEQ ID NO: 2210 - RNA, 23 nt, Artificial Sequence
  source: /note="Description of Artificial Sequence: Synthetic oligonucleotide"
auguagaaaggcaugaagcaguu

SEQ ID NO: 2211 - DNA, 21 bp, Artificial Sequence
  source: /note="Description of Artificial Sequence: Synthetic oligonucleotide"
  source: /note="Description of Combined DNA/RNA Molecule: Synthetic oligonucleotide"
  modified_base (21)..(21): Inverted abasic nucleotide
cugcuucaugccuuuctacan

SEQ ID NO: 2212 - RNA, 23 nt, Artificial Sequence
  source: /note="Description of Artificial Sequence: Synthetic oligonucleotide"
auguagaaaggcaugaagcaguu

SEQ ID NO: 2213 - RNA, 21 nt, Artificial Sequence
  source: /note="Description of Artificial Sequence: Synthetic oligonucleotide"
  modified_base (21)..(21): Inverted abasic nucleotide
cugcuucaugccuuucuacan

SEQ ID NO: 2214 - RNA, 23 nt, Artificial Sequence
  source: /note="Description of Artificial Sequence: Synthetic oligonucleotide"
auguagaaaggcaugaagcaguu

SEQ ID NO: 2215 - RNA, 21 nt, Artificial Sequence
  source: /note="Description of Artificial Sequence: Synthetic oligonucleotide"
  modified_base (21)..(21): Inverted abasic nucleotide
cugcuucaugccuuucuacan

SEQ ID NO: 2216 - RNA, 23 nt, Artificial Sequence
  source: /note="Description of Artificial Sequence: Synthetic oligonucleotide"
auguagaaaggcaugaagcaguu

SEQ ID NO: 2217 - DNA, 21 bp, Artificial Sequence
  source: /note="Description of Artificial Sequence: Synthetic oligonucleotide"
  source: /note="Description of Combined DNA/RNA Molecule: Synthetic oligonucleotide"
  modified_base (21)..(21): Inverted abasic nucleotide
cugcuucaugccuutcuacan

SEQ ID NO: 2218 - RNA, 23 nt, Artificial Sequence
  source: /note="Description of Artificial Sequence: Synthetic oligonucleotide"
  modified_base (7)..(7): Abasic nucleotide
auguagnaaggcaugaagcaguu

SEQ ID NO: 2219 - DNA, 21 bp, Artificial Sequence
  source: /note="Description of Artificial Sequence: Synthetic oligonucleotide"
  source: /note="Description of Combined DNA/RNA Molecule: Synthetic oligonucleotide"
  modified_base (21)..(21): Inverted abasic nucleotide
cugcuucaugccuuuctacan

SEQ ID NO: 2220 - RNA, 23 nt, Artificial Sequence
  source: /note="Description of Artificial Sequence: Synthetic oligonucleotide"
  modified_base (5)..(5): Abasic nucleotide
augungaaaggcaugaagcaguu

SEQ ID NO: 2221 - RNA, 21 nt, Artificial Sequence
  source: /note="Description of Artificial Sequence: Synthetic oligonucleotide"
  modified_base (21)..(21): Inverted abasic nucleotide
cugcuucaugccuuucuacan

SEQ ID NO: 2222 - RNA, 23 nt, Artificial Sequence
  source: /note="Description of Artificial Sequence: Synthetic oligonucleotide"
  modified_base (4)..(4): Abasic nucleotide
augnagaaaggcaugaagcaguu

SEQ ID NO: 2223 - RNA, 21 nt, Artificial Sequence
  source: /note="Description of Artificial Sequence: Synthetic oligonucleotide"
  modified_base (21)..(21): Inverted abasic nucleotide
cugcuucaugccuuucuacan

SEQ ID NO: 2224 - RNA, 23 nt, Artificial Sequence
  source: /note="Description of Artificial Sequence: Synthetic oligonucleotide"
auguagaaaggcaugaagcaguu

SEQ ID NO: 2225 - RNA, 21 nt, Artificial Sequence
  source: /note="Description of Artificial Sequence: Synthetic oligonucleotide"
  modified_base (21)..(21): Inverted abasic nucleotide
cugcuucaugccuuucuacan

SEQ ID NO: 2226 - RNA, 23 nt, Artificial Sequence
  source: /note="Description of Artificial Sequence: Synthetic oligonucleotide"
auguagaaaggcaugaagcaguu

SEQ ID NO: 2227 - DNA, 21 bp, Artificial Sequence
  source: /note="Description of Artificial Sequence: Synthetic oligonucleotide"
  source: /note="Description of Combined DNA/RNA Molecule: Synthetic oligonucleotide"
  modified_base (21)..(21): Inverted abasic nucleotide
cugcuucaugccutucuacan

SEQ ID NO: 2228 - RNA, 23 nt, Artificial Sequence
  source: /note="Description of Artificial Sequence: Synthetic oligonucleotide"
auguagaaaggcaugaagcaguu

SEQ ID NO: 2229 - DNA, 21 bp, Artificial Sequence
  source: /note="Description of Artificial Sequence: Synthetic oligonucleotide"
  source: /note="Description of Combined DNA/RNA Molecule: Synthetic oligonucleotide"
  modified_base (21)..(21): Inverted abasic nucleotide
cugcuucaugccutucuacan

SEQ ID NO: 2230 - RNA, 23 nt, Artificial Sequence
  source: /note="Description of Artificial Sequence: Synthetic oligonucleotide"
auguagaaaggcaugaagcaguu

SEQ ID NO: 2231 - DNA, 21 bp, Artificial Sequence
  source: /note="Description of Artificial Sequence: Synthetic oligonucleotide"
  source: /note="Description of Combined DNA/RNA Molecule: Synthetic oligonucleotide"
  modified_base (21)..(21): Inverted abasic nucleotide
cugcuucaugccutucuacan

SEQ ID NO: 2232 - RNA, 23 nt, Artificial Sequence
  source: /note="Description of Artificial Sequence: Synthetic oligonucleotide"
auguagaaaggcaugaagcaguu

SEQ ID NO: 2233 - DNA, 21 bp, Artificial Sequence
  source: /note="Description of Artificial Sequence: Synthetic oligonucleotide"
  source: /note="Description of Combined DNA/RNA Molecule: Synthetic oligonucleotide"
  modified_base (21)..(21): Inverted abasic nucleotide
cugcuucaugccutucuacan

SEQ ID NO: 2234 - RNA, 23 nt, Artificial Sequence
  source: /note="Description of Artificial Sequence: Synthetic oligonucleotide"
auguagaaaggcaugaagcaguu

SEQ ID NO: 2235 - DNA, 21 bp, Artificial Sequence
  source: /note="Description of Artificial Sequence: Synthetic oligonucleotide"
  source: /note="Description of Combined DNA/RNA Molecule: Synthetic oligonucleotide"
ugcuucaugccuuucuacaga

SEQ ID NO: 2236 - RNA, 23 nt, Artificial Sequence
  source: /note="Description of Artificial Sequence: Synthetic oligonucleotide"
  modified_base (5)..(5): Abasic nucleotide
ucugnagaaaggcaugaagcauu

SEQ ID NO: 2237 - DNA, 21 bp, Artificial Sequence
  source: /note="Description of Artificial Sequence: Synthetic oligonucleotide"
  source: /note="Description of Combined DNA/RNA Molecule: Synthetic oligonucleotide"
ugcuucaugccuuuctacaga

SEQ ID NO: 2238 - RNA, 23 nt, Artificial Sequence
  source: /note="Description of Artificial Sequence: Synthetic oligonucleotide"
  modified_base (6)..(6): Abasic nucleotide
ucugungaaaggcaugaagcauu

SEQ ID NO: 2239 - DNA, 21 bp, Artificial Sequence
  source: /note="Description of Artificial Sequence: Synthetic oligonucleotide"
  source: /note="Description of Combined DNA/RNA Molecule: Synthetic oligonucleotide"
ugcuucaugccuutcuacaga

SEQ ID NO: 2240 - RNA, 23 nt, Artificial Sequence
  source: /note="Description of Artificial Sequence: Synthetic oligonucleotide"
  modified_base (8)..(8): Abasic nucleotide
ucuguagnaaggcaugaagcauu

SEQ ID NO: 2241 - DNA, 21 bp, Artificial Sequence
  source: /note="Description of Artificial Sequence: Synthetic oligonucleotide"
  source: /note="Description of Combined DNA/RNA Molecule: Synthetic oligonucleotide"
ugcuucaugccuuucuacaga

SEQ ID NO: 2242 - RNA, 23 nt, Artificial Sequence
  source: /note="Description of Artificial Sequence: Synthetic oligonucleotide"
ucuguagaaaggcaugaagcauu

SEQ ID NO: 2243 - DNA, 21 bp, Artificial Sequence
  source: /note="Description of Artificial Sequence: Synthetic oligonucleotide"
  source: /note="Description of Combined DNA/RNA Molecule: Synthetic oligonucleotide"
ugcuucaugccuuucuacaga

SEQ ID NO: 2244 - RNA, 23 nt, Artificial Sequence
  source: /note="Description of Artificial Sequence: Synthetic oligonucleotide"
ucuguagaaaggcaugaagcauu

SEQ ID NO: 2245 - DNA, 21 bp, Artificial Sequence
  source: /note="Description of Artificial Sequence: Synthetic oligonucleotide"
  source: /note="Description of Combined DNA/RNA Molecule: Synthetic oligonucleotide"
ugcuucaugccuuuctacaga

SEQ ID NO: 2246 - RNA, 23 nt, Artificial Sequence
  source: /note="Description of Artificial Sequence: Synthetic oligonucleotide"
ucuguagaaaggcaugaagcauu

SEQ ID NO: 2247 - DNA, 21 bp, Artificial Sequence
  source: /note="Description of Artificial Sequence: Synthetic oligonucleotide"
  source: /note="Description of Combined DNA/RNA Molecule: Synthetic oligonucleotide"
ugcuucaugccuuucuacaga

SEQ ID NO: 2248 - RNA, 23 nt, Artificial Sequence
  source: /note="Description of Artificial Sequence: Synthetic oligonucleotide"
  modified_base (2)..(2): Abasic nucleotide
unuguagaaaggcaugaagcauu

SEQ ID NO: 2249 - DNA, 21 bp, Artificial Sequence
  source: /note="Description of Artificial Sequence: Synthetic oligonucleotide"
  source: /note="Description of Combined DNA/RNA Molecule: Synthetic oligonucleotide"
ugcuucaugccuuucuacaga

SEQ ID NO: 2250 - RNA, 23 nt, Artificial Sequence
  source: /note="Description of Artificial Sequence: Synthetic oligonucleotide"
  modified_base (3)..(3): Abasic nucleotide
ucnguagaaaggcaugaagcauu

SEQ ID NO: 2251 - RNA, 21 nt, Artificial Sequence
  source: /note="Description of Artificial Sequence: Synthetic oligonucleotide"
  modified_base (21)..(21): Inverted abasic nucleotide
ucaugccuuucuacaguggcn

SEQ ID NO: 2252 - RNA, 23 nt, Artificial Sequence
  source: /note="Description of Artificial Sequence: Synthetic oligonucleotide"
  modified_base (6)..(6): Abasic nucleotide
agccanuguagaaaggcaugauu

SEQ ID NO: 2253 - DNA, 21 bp, Artificial Sequence
  source: /note="Description of Artificial Sequence: Synthetic oligonucleotide"
  source: /note="Description of Combined DNA/RNA Molecule: Synthetic oligonucleotide"
  modified_base (21)..(21): Inverted abasic nucleotide
ucaugccuuucuacagtggcn

SEQ ID NO: 2254 - RNA, 23 nt, Artificial Sequence
  source: /note="Description of Artificial Sequence: Synthetic oligonucleotide"
  modified_base (6)..(6): Abasic nucleotide
agccanuguagaaaggcaugauu

SEQ ID NO: 2255 - RNA, 21 nt, Artificial Sequence
  source: /note="Description of Artificial Sequence: Synthetic oligonucleotide"
  modified_base (21)..(21): Inverted abasic nucleotide
ucaugccuuucuacaguggcn

SEQ ID NO: 2256 - RNA, 23 nt, Artificial Sequence
  source: /note="Description of Artificial Sequence: Synthetic oligonucleotide"
  modified_base (6)..(6): Abasic nucleotide
agccanuguagaaaggcaugauu

SEQ ID NO: 2257 - RNA, 21 nt, Artificial Sequence
  source: /note="Description of Artificial Sequence: Synthetic oligonucleotide"
gguauguuccugcuucauuuu

SEQ ID NO: 2258 - RNA, 21 nt, Artificial Sequence
  source: /note="Description of Artificial Sequence: Synthetic oligonucleotide"
aaugaagcaggaacauaccuu

SEQ ID NO: 2259 - RNA, 21 nt, Artificial Sequence
  source: /note="Description of Artificial Sequence: Synthetic oligonucleotide"
gguauguuccugcuucauauu

SEQ ID NO: 2260 - RNA, 21 nt, Artificial Sequence
  source: /note="Description of Artificial Sequence: Synthetic oligonucleotide"
uaugaagcaggaacauaccuu

SEQ ID NO: 2261 - RNA, 21 nt, Artificial Sequence
  source: /note="Description of Artificial Sequence: Synthetic oligonucleotide"
guauguuccugcuucauguuu

SEQ ID NO: 2262 - RNA, 21 nt, Artificial Sequence
  source: /note="Description of Artificial Sequence: Synthetic oligonucleotide"
acaugaagcaggaacauacuu

SEQ ID NO: 2263 - RNA, 21 nt, Artificial Sequence
  source: /note="Description of Artificial Sequence: Synthetic oligonucleotide"
uauguuccugcuucaugcauu

SEQ ID NO: 2264 - RNA, 21 nt, Artificial Sequence
  source: /note="Description of Artificial Sequence: Synthetic oligonucleotide"
ugcaugaagcaggaacauauu

SEQ ID NO: 2265 - RNA, 21 nt, Artificial Sequence
  source: /note="Description of Artificial Sequence: Synthetic oligonucleotide"
auguuccugcuucaugccuuu

SEQ ID NO: 2266 - RNA, 21 nt, Artificial Sequence
  source: /note="Description of Artificial Sequence: Synthetic oligonucleotide"
aggcaugaagcaggaacauuu

SEQ ID NO: 2267 - RNA, 21 nt, Artificial Sequence
  source: /note="Description of Artificial Sequence: Synthetic oligonucleotide"
uguuccugcuucaugccuuuu

SEQ ID NO: 2268 - RNA, 21 nt, Artificial Sequence
  source: /note="Description of Artificial Sequence: Synthetic oligonucleotide"
aaggcaugaagcaggaacauu

SEQ ID NO: 2269 - RNA, 21 nt, Artificial Sequence
  source: /note="Description of Artificial Sequence: Synthetic oligonucleotide"
guuccugcuucaugccuuuuu

SEQ ID NO: 2270 - RNA, 21 nt, Artificial Sequence
  source: /note="Description of Artificial Sequence: Synthetic oligonucleotide"
aaaggcaugaagcaggaacuu

SEQ ID NO: 2271 - RNA, 21 nt, Artificial Sequence
  source: /note="Description of Artificial Sequence: Synthetic oligonucleotide"
uuccugcuucaugccuuuuuu

SEQ ID NO: 2272 - RNA, 21 nt, Artificial Sequence
  source: /note="Description of Artificial Sequence: Synthetic oligonucleotide"
aaaaggcaugaagcaggaauu

SEQ ID NO: 2273 - RNA, 21 nt, Artificial Sequence
  source: /note="Description of Artificial Sequence: Synthetic oligonucleotide"
uuccugcuucaugccuuuauu

SEQ ID NO: 2274 - RNA, 21 nt, Artificial Sequence
  source: /note="Description of Artificial Sequence: Synthetic oligonucleotide"
uaaaggcaugaagcaggaauu

SEQ ID NO: 2275 - RNA, 21 nt, Artificial Sequence
  source: /note="Description of Artificial Sequence: Synthetic oligonucleotide"
uccugcuucaugccuuucuuu

SEQ ID NO: 2276 - RNA, 21 nt, Artificial Sequence
  source: /note="Description of Artificial Sequence: Synthetic oligonucleotide"
agaaaggcaugaagcaggauu

SEQ ID NO: 2277 - RNA, 21 nt, Artificial Sequence
  source: /note="Description of Artificial Sequence: Synthetic oligonucleotide"
ccugcuucaugccuuucuauu

SEQ ID NO: 2278 - RNA, 21 nt, Artificial Sequence
  source: /note="Description of Artificial Sequence: Synthetic oligonucleotide"
uagaaaggcaugaagcagguu

SEQ ID NO: 2279 - RNA, 21 nt, Artificial Sequence
  source: /note="Description of Artificial Sequence: Synthetic oligonucleotide"
cugcuucaugccuuucuauuu

SEQ ID NO: 2280 - RNA, 21 nt, Artificial Sequence
  source: /note="Description of Artificial Sequence: Synthetic oligonucleotide"
auagaaaggcaugaagcaguu

SEQ ID NO: 2281 - RNA, 21 nt, Artificial Sequence
  source: /note="Description of Artificial Sequence: Synthetic oligonucleotide"
cugcuucaugccuuucuaauu

SEQ ID NO: 2282 - RNA, 21 nt, Artificial Sequence
  source: /note="Description of Artificial Sequence: Synthetic oligonucleotide"
uuagaaaggcaugaagcaguu

SEQ ID NO: 2283 - RNA, 21 nt, Artificial Sequence
  source: /note="Description of Artificial Sequence: Synthetic oligonucleotide"
ugcuucaugccuuucuacauu

SEQ ID NO: 2284 - RNA, 21 nt, Artificial Sequence
  source: /note="Description of Artificial Sequence: Synthetic oligonucleotide"
uguagaaaggcaugaagcauu

SEQ ID NO: 2285 - RNA, 21 nt, Artificial Sequence
  source: /note="Description of Artificial Sequence: Synthetic oligonucleotide"
gcuucaugccuuucuacauuu

SEQ ID NO: 2286 - RNA, 21 nt, Artificial Sequence
  source: /note="Description of Artificial Sequence: Synthetic oligonucleotide"
auguagaaaggcaugaagcuu

SEQ ID NO: 2287 - RNA, 21 nt, Artificial Sequence
  source: /note="Description of Artificial Sequence: Synthetic oligonucleotide"
gcuucaugccuuucuacaauu

SEQ ID NO: 2288 - RNA, 21 nt, Artificial Sequence
  source: /note="Description of Artificial Sequence: Synthetic oligonucleotide"
uuguagaaaggcaugaagcuu

SEQ ID NO: 2289 - RNA, 21 nt, Artificial Sequence
  source: /note="Description of Artificial Sequence: Synthetic oligonucleotide"
cuucaugccuuucuacaguuu

SEQ ID NO: 2290 - RNA, 21 nt, Artificial Sequence
  source: /note="Description of Artificial Sequence: Synthetic oligonucleotide"
acuguagaaaggcaugaaguu

SEQ ID NO: 2291 - RNA, 21 nt, Artificial Sequence
  source: /note="Description of Artificial Sequence: Synthetic oligonucleotide"
uucaugccuuucuacaguuuu

SEQ ID NO: 2292 - RNA, 21 nt, Artificial Sequence
  source: /note="Description of Artificial Sequence: Synthetic oligonucleotide"
aacuguagaaaggcaugaauu

SEQ ID NO: 2293 - RNA, 21 nt, Artificial Sequence
  source: /note="Description of Artificial Sequence: Synthetic oligonucleotide"
uucaugccuuucuacaguauu

SEQ ID NO: 2294 - RNA, 21 nt, Artificial Sequence
  source: /note="Description of Artificial Sequence: Synthetic oligonucleotide"
uacuguagaaaggcaugaauu

SEQ ID NO: 2295 - RNA, 21 nt, Artificial Sequence
  source: /note="Description of Artificial Sequence: Synthetic oligonucleotide"
ucaugccuuucuacaguguuu

SEQ ID NO: 2296 - RNA, 21 nt, Artificial Sequence
  source: /note="Description of Artificial Sequence: Synthetic oligonucleotide"
acacuguagaaaggcaugauu

SEQ ID NO: 2297 - RNA, 21 nt, Artificial Sequence
  source: /note="Description of Artificial Sequence: Synthetic oligonucleotide"
ucaugccuuucuacagugauu

SEQ ID NO: 2298 - RNA, 21 nt, Artificial Sequence
  source: /note="Description of Artificial Sequence: Synthetic oligonucleotide"
ucacuguagaaaggcaugauu

SEQ ID NO: 2299 - RNA, 21 nt, Artificial Sequence
  source: /note="Description of Artificial Sequence: Synthetic oligonucleotide"
caugccuuucuacagugguuu

SEQ ID NO: 2300 - RNA, 21 nt, Artificial Sequence
  source: /note="Description of Artificial Sequence: Synthetic oligonucleotide"
accacuguagaaaggcauguu

SEQ ID NO: 2301 - RNA, 21 nt, Artificial Sequence
  source: /note="Description of Artificial Sequence: Synthetic oligonucleotide"
caugccuuucuacaguggauu

SEQ ID NO: 2302 - RNA, 21 nt, Artificial Sequence
  source: /note="Description of Artificial Sequence: Synthetic oligonucleotide"
uccacuguagaaaggcauguu

SEQ ID NO: 2303 - RNA, 21 nt, Artificial Sequence
  source: /note="Description of Artificial Sequence: Synthetic oligonucleotide"
augccuuucuacaguggcuuu

SEQ ID NO: 2304 - RNA, 21 nt, Artificial Sequence
  source: /note="Description of Artificial Sequence: Synthetic oligonucleotide"
agccacuguagaaaggcauuu

SEQ ID NO: 2305 - RNA, 21 nt, Artificial Sequence
  source: /note="Description of Artificial Sequence: Synthetic oligonucleotide"
augccuuucuacaguggcauu

SEQ ID NO: 2306 - RNA, 21 nt, Artificial Sequence
  source: /note="Description of Artificial Sequence: Synthetic oligonucleotide"
ugccacuguagaaaggcauuu

SEQ ID NO: 2307 - RNA, 21 nt, Artificial Sequence
  source: /note="Description of Artificial Sequence: Synthetic oligonucleotide"
ugccuuucuacaguggccuuu

SEQ ID NO: 2308 - RNA, 21 nt, Artificial Sequence
  source: /note="Description of Artificial Sequence: Synthetic oligonucleotide"
aggccacuguagaaaggcauu

SEQ ID NO: 2309 - RNA, 21 nt, Artificial Sequence
  source: /note="Description of Artificial Sequence: Synthetic oligonucleotide"
gccuuucuacaguggccuuuu

SEQ ID NO: 2310 - RNA, 21 nt, Artificial Sequence
  source: /note="Description of Artificial Sequence: Synthetic oligonucleotide"
aaggccacuguagaaaggcuu

SEQ ID NO: 2311 - RNA, 21 nt, Artificial Sequence
  source: /note="Description of Artificial Sequence: Synthetic oligonucleotide"
gguauguuccugcuucaucuu

SEQ ID NO: 2312 - RNA, 21 nt, Artificial Sequence
  source: /note="Description of Artificial Sequence: Synthetic oligonucleotide"
gaugaagcaggaacauaccuu

SEQ ID NO: 2313 - RNA, 21 nt, Artificial Sequence
  source: /note="Description of Artificial Sequence: Synthetic oligonucleotide"
guauguuccugcuucauccuu

SEQ ID NO: 2314 - RNA, 21 nt, Artificial Sequence
  source: /note="Description of Artificial Sequence: Synthetic oligonucleotide"
ggaugaagcaggaacauacuu

SEQ ID NO: 2315 - RNA, 21 nt, Artificial Sequence
  source: /note="Description of Artificial Sequence: Synthetic oligonucleotide"
uauguuccugcuucaucccuu

SEQ ID NO: 2316 - RNA, 21 nt, Artificial Sequence
  source: /note="Description of Artificial Sequence: Synthetic oligonucleotide"
gggaugaagcaggaacauauu

SEQ ID NO: 2317 - RNA, 21 nt, Artificial Sequence
  source: /note="Description of Artificial Sequence: Synthetic oligonucleotide"
auguuccugcuucauccccuu

SEQ ID NO: 2318 - RNA, 21 nt, Artificial Sequence
  source: /note="Description of Artificial Sequence: Synthetic oligonucleotide"
ggggaugaagcaggaacauuu

SEQ ID NO: 2319 - RNA, 21 nt, Artificial Sequence
  source: /note="Description of Artificial Sequence: Synthetic oligonucleotide"
uguuccugcuucauccccuuu

SEQ ID NO: 2320 - RNA, 21 nt, Artificial Sequence
  source: /note="Description of Artificial Sequence: Synthetic oligonucleotide"
aggggaugaagcaggaacauu

SEQ ID NO: 2321 - RNA, 21 nt, Artificial Sequence
  source: /note="Description of Artificial Sequence: Synthetic oligonucleotide"
guuccugcuucauccccuuuu

SEQ ID NO: 2322 - RNA, 21 nt, Artificial Sequence
  source: /note="Description of Artificial Sequence: Synthetic oligonucleotide"
aaggggaugaagcaggaacuu

SEQ ID NO: 2323 - RNA, 21 nt, Artificial Sequence
  source: /note="Description of Artificial Sequence: Synthetic oligonucleotide"
uuccugcuucauccccuucuu

SEQ ID NO: 2324 - RNA, 21 nt, Artificial Sequence
  source: /note="Description of Artificial Sequence: Synthetic oligonucleotide"
gaaggggaugaagcaggaauu

SEQ ID NO: 2325 - RNA, 21 nt, Artificial Sequence
  source: /note="Description of Artificial Sequence: Synthetic oligonucleotide"
uccugcuucauccccuucuuu

SEQ ID NO: 2326 - RNA, 21 nt, Artificial Sequence
  source: /note="Description of Artificial Sequence: Synthetic oligonucleotide"
agaaggggaugaagcaggauu

SEQ ID NO: 2327 - RNA, 21 nt, Artificial Sequence
  source: /note="Description of Artificial Sequence: Synthetic oligonucleotide"
ccugcuucauccccuucuauu

SEQ ID NO: 2328 - RNA, 21 nt, Artificial Sequence
  source: /note="Description of Artificial Sequence: Synthetic oligonucleotide"
uagaaggggaugaagcagguu

SEQ ID NO: 2329 - RNA, 21 nt, Artificial Sequence
  source: /note="Description of Artificial Sequence: Synthetic oligonucleotide"
cugcuucauccccuucuacuu

SEQ ID NO: 2330 - RNA, 21 nt, Artificial Sequence
  source: /note="Description of Artificial Sequence: Synthetic oligonucleotide"
guagaaggggaugaagcaguu

SEQ ID NO: 2331 - RNA, 21 nt, Artificial Sequence
  source: /note="Description of Artificial Sequence: Synthetic oligonucleotide"
ugcuucauccccuucuacauu

SEQ ID NO: 2332 - RNA, 21 nt, Artificial Sequence
  source: /note="Description of Artificial Sequence: Synthetic oligonucleotide"
uguagaaggggaugaagcauu

SEQ ID NO: 2333 - RNA, 21 nt, Artificial Sequence
  source: /note="Description of Artificial Sequence: Synthetic oligonucleotide"
gcuucauccccuucuacaguu

SEQ ID NO: 2334 - RNA, 21 nt, Artificial Sequence
  source: /note="Description of Artificial Sequence: Synthetic oligonucleotide"
cuguagaaggggaugaagcuu

SEQ ID NO: 2335 - RNA, 21 nt, Artificial Sequence
  source: /note="Description of Artificial Sequence: Synthetic oligonucleotide"
cuucauccccuucuacaguuu

SEQ ID NO: 2336 - RNA, 21 nt, Artificial Sequence
  source: /note="Description of Artificial Sequence: Synthetic oligonucleotide"
acuguagaaggggaugaaguu

SEQ ID NO: 2337 - RNA, 21 nt, Artificial Sequence
  source: /note="Description of Artificial Sequence: Synthetic oligonucleotide"
uucauccccuucuacaguguu

SEQ ID NO: 2338 - RNA, 21 nt, Artificial Sequence
  source: /note="Description of Artificial Sequence: Synthetic oligonucleotide"
cacuguagaaggggaugaauu

SEQ ID NO: 2339 - RNA, 21 nt, Artificial Sequence
  source: /note="Description of Artificial Sequence: Synthetic oligonucleotide"
ucauccccuucuacagugguu

SEQ ID NO: 2340 - RNA, 21 nt, Artificial Sequence
  source: /note="Description of Artificial Sequence: Synthetic oligonucleotide"
ccacuguagaaggggaugauu

SEQ ID NO: 2341 - RNA, 21 nt, Artificial Sequence
  source: /note="Description of Artificial Sequence: Synthetic oligonucleotide"
cauccccuucuacaguggcuu

SEQ ID NO: 2342 - RNA, 21 nt, Artificial Sequence
  source: /note="Description of Artificial Sequence: Synthetic oligonucleotide"
gccacuguagaaggggauguu

SEQ ID NO: 2343 - RNA, 21 nt, Artificial Sequence
  source: /note="Description of Artificial Sequence: Synthetic oligonucleotide"
auccccuucuacaguggccuu

SEQ ID NO: 2344 - RNA, 21 nt, Artificial Sequence
  source: /note="Description of Artificial Sequence: Synthetic oligonucleotide"
ggccacuguagaaggggauuu

SEQ ID NO: 2345 - RNA, 21 nt, Artificial Sequence
  source: /note="Description of Artificial Sequence: Synthetic oligonucleotide"
uccccuucuacaguggccuuu

SEQ ID NO: 2346 - RNA, 21 nt, Artificial Sequence
  source: /note="Description of Artificial Sequence: Synthetic oligonucleotide"
aggccacuguagaaggggauu

SEQ ID NO: 2347 - RNA, 21 nt, Artificial Sequence
  source: /note="Description of Artificial Sequence: Synthetic oligonucleotide"
ccccuucuacaguggccuuuu

SEQ ID NO: 2348 - RNA, 21 nt, Artificial Sequence
  source: /note="Description of Artificial Sequence: Synthetic oligonucleotide"
aaggccacuguagaagggguu

SEQ ID NO: 2349 - RNA, 21 nt, Artificial Sequence
  source: /note="Description of Artificial Sequence: Synthetic oligonucleotide"
gguauguuccugcuucauuuu

SEQ ID NO: 2350 - RNA, 21 nt, Artificial Sequence
  source: /note="Description of Artificial Sequence: Synthetic oligonucleotide"
aaugaagcaggaacauaccuu

SEQ ID NO: 2351 - RNA, 21 nt, Artificial Sequence
  source: /note="Description of Artificial Sequence: Synthetic oligonucleotide"
gguauguuccugcuucauauu

SEQ ID NO: 2352 - RNA, 21 nt, Artificial Sequence
  source: /note="Description of Artificial Sequence: Synthetic oligonucleotide"
uaugaagcaggaacauaccuu

SEQ ID NO: 2353 - RNA, 21 nt, Artificial Sequence
  source: /note="Description of Artificial Sequence: Synthetic oligonucleotide"
guauguuccugcuucauguuu

SEQ ID NO: 2354 - RNA, 21 nt, Artificial Sequence
  source: /note="Description of Artificial Sequence: Synthetic oligonucleotide"
acaugaagcaggaacauacuu

SEQ ID NO: 2355 - RNA, 21 nt, Artificial Sequence
  source: /note="Description of Artificial Sequence: Synthetic oligonucleotide"
uauguuccugcuucaugcauu

SEQ ID NO: 2356 - RNA, 21 nt, Artificial Sequence
  source: /note="Description of Artificial Sequence: Synthetic oligonucleotide"
ugcaugaagcaggaacauauu

SEQ ID NO: 2357 - RNA, 21 nt, Artificial Sequence
  source: /note="Description of Artificial Sequence: Synthetic oligonucleotide"
auguuccugcuucaugccuuu

SEQ ID NO: 2358 - RNA, 21 nt, Artificial Sequence
  source: /note="Description of Artificial Sequence: Synthetic oligonucleotide"
aggcaugaagcaggaacauuu

SEQ ID NO: 2359 - RNA, 21 nt, Artificial Sequence
  source: /note="Description of Artificial Sequence: Synthetic oligonucleotide"
uguuccugcuucaugccuuuu

SEQ ID NO: 2360 - RNA, 21 nt, Artificial Sequence
  source: /note="Description of Artificial Sequence: Synthetic oligonucleotide"
aaggcaugaagcaggaacauu

SEQ ID NO: 2361 - RNA, 21 nt, Artificial Sequence
  source: /note="Description of Artificial Sequence: Synthetic oligonucleotide"
guuccugcuucaugccuuuuu

SEQ ID NO: 2362 - RNA, 21 nt, Artificial Sequence
  source: /note="Description of Artificial Sequence: Synthetic oligonucleotide"
aaaggcaugaagcaggaacuu

SEQ ID NO: 2363 - RNA, 21 nt, Artificial Sequence
  source: /note="Description of Artificial Sequence: Synthetic oligonucleotide"
uuccugcuucaugccuuuuuu

SEQ ID NO: 2364 - RNA, 21 nt, Artificial Sequence
  source: /note="Description of Artificial Sequence: Synthetic oligonucleotide"
aaaaggcaugaagcaggaauu

SEQ ID NO: 2365 - RNA, 21 nt, Artificial Sequence
  source: /note="Description of Artificial Sequence: Synthetic oligonucleotide"
uuccugcuucaugccuuuauu

SEQ ID NO: 2366 - RNA, 21 nt, Artificial Sequence
  source: /note="Description of Artificial Sequence: Synthetic oligonucleotide"
uaaaggcaugaagcaggaauu

SEQ ID NO: 2367 - RNA, 21 nt, Artificial Sequence
  source: /note="Description of Artificial Sequence: Synthetic oligonucleotide"
uccugcuucaugccuuucuuu

SEQ ID NO: 2368 - RNA, 21 nt, Artificial Sequence
  source: /note="Description of Artificial Sequence: Synthetic oligonucleotide"
agaaaggcaugaagcaggauu

SEQ ID NO: 2369 - RNA, 21 nt, Artificial Sequence
  source: /note="Description of Artificial Sequence: Synthetic oligonucleotide"
ccugcuucaugccuuucuauu

SEQ ID NO: 2370 - RNA, 21 nt, Artificial Sequence
  source: /note="Description of Artificial Sequence: Synthetic oligonucleotide"
uagaaaggcaugaagcagguu

SEQ ID NO: 2371 - RNA, 21 nt, Artificial Sequence
  source: /note="Description of Artificial Sequence: Synthetic oligonucleotide"
cugcuucaugccuuucuauuu

SEQ ID NO: 2372 - RNA, 21 nt, Artificial Sequence
  source: /note="Description of Artificial Sequence: Synthetic oligonucleotide"
auagaaaggcaugaagcaguu

SEQ ID NO: 2373 - RNA, 21 nt, Artificial Sequence
  source: /note="Description of Artificial Sequence: Synthetic oligonucleotide"
cugcuucaugccuuucuaauu

SEQ ID NO: 2374 - RNA, 21 nt, Artificial Sequence
  source: /note="Description of Artificial Sequence: Synthetic oligonucleotide"
uuagaaaggcaugaagcaguu

SEQ ID NO: 2375 - RNA, 21 nt, Artificial Sequence
  source: /note="Description of Artificial Sequence: Synthetic oligonucleotide"
ugcuucaugccuuucuacauu

SEQ ID NO: 2376 - RNA, 21 nt, Artificial Sequence
  source: /note="Description of Artificial Sequence: Synthetic oligonucleotide"
uguagaaaggcaugaagcauu

SEQ ID NO: 2377 - RNA, 21 nt, Artificial Sequence
  source: /note="Description of Artificial Sequence: Synthetic oligonucleotide"
gcuucaugccuuucuacauuu

SEQ ID NO: 2378 - RNA, 21 nt, Artificial Sequence
  source: /note="Description of Artificial Sequence: Synthetic oligonucleotide"
auguagaaaggcaugaagcuu

SEQ ID NO: 2379 - RNA, 21 nt, Artificial Sequence
  source: /note="Description of Artificial Sequence: Synthetic oligonucleotide"
gcuucaugccuuucuacaauu

SEQ ID NO: 2380 - RNA, 21 nt, Artificial Sequence
  source: /note="Description of Artificial Sequence: Synthetic oligonucleotide"
uuguagaaaggcaugaagcuu

SEQ ID NO: 2381 - RNA, 21 nt, Artificial Sequence
  source: /note="Description of Artificial Sequence: Synthetic oligonucleotide"
cuucaugccuuucuacaguuu

SEQ ID NO: 2382 - RNA, 21 nt, Artificial Sequence
  source: /note="Description of Artificial Sequence: Synthetic oligonucleotide"
acuguagaaaggcaugaaguu

SEQ ID NO: 2383 - RNA, 21 nt, Artificial Sequence
  source: /note="Description of Artificial Sequence: Synthetic oligonucleotide"
uucaugccuuucuacaguuuu

SEQ ID NO: 2384 - RNA, 21 nt, Artificial Sequence
  source: /note="Description of Artificial Sequence: Synthetic oligonucleotide"
aacuguagaaaggcaugaauu

SEQ ID NO: 2385 - RNA, 21 nt, Artificial Sequence
  source: /note="Description of Artificial Sequence: Synthetic oligonucleotide"
uucaugccuuucuacaguauu

SEQ ID NO: 2386 - RNA, 21 nt, Artificial Sequence
  source: /note="Description of Artificial Sequence: Synthetic oligonucleotide"
uacuguagaaaggcaugaauu

SEQ ID NO: 2387 - RNA, 21 nt, Artificial Sequence
  source: /note="Description of Artificial Sequence: Synthetic oligonucleotide"
ucaugccuuucuacaguguuu

SEQ ID NO: 2388 - RNA, 21 nt, Artificial Sequence
  source: /note="Description of Artificial Sequence: Synthetic oligonucleotide"
acacuguagaaaggcaugauu

SEQ ID NO: 2389 - RNA, 21 nt, Artificial Sequence
  source: /note="Description of Artificial Sequence: Synthetic oligonucleotide"
ucaugccuuucuacagugauu

SEQ ID NO: 2390 - RNA, 21 nt, Artificial Sequence
  source: /note="Description of Artificial Sequence: Synthetic oligonucleotide"
ucacuguagaaaggcaugauu

SEQ ID NO: 2391 - RNA, 21 nt, Artificial Sequence
  source: /note="Description of Artificial Sequence: Synthetic oligonucleotide"
caugccuuucuacagugguuu

SEQ ID NO: 2392 - RNA, 21 nt, Artificial Sequence
  source: /note="Description of Artificial Sequence: Synthetic oligonucleotide"
accacuguagaaaggcauguu

SEQ ID NO: 2393 - RNA, 21 nt, Artificial Sequence
  source: /note="Description of Artificial Sequence: Synthetic oligonucleotide"
caugccuuucuacaguggauu

SEQ ID NO: 2394 - RNA, 21 nt, Artificial Sequence
  source: /note="Description of Artificial Sequence: Synthetic oligonucleotide"
uccacuguagaaaggcauguu

SEQ ID NO: 2395 - RNA, 21 nt, Artificial Sequence
  source: /note="Description of Artificial Sequence: Synthetic oligonucleotide"
augccuuucuacaguggcuuu

SEQ ID NO: 2396 - RNA, 21 nt, Artificial Sequence
  source: /note="Description of Artificial Sequence: Synthetic oligonucleotide"
agccacuguagaaaggcauuu

SEQ ID NO: 2397 - RNA, 21 nt, Artificial Sequence
  source: /note="Description of Artificial Sequence: Synthetic oligonucleotide"
augccuuucuacaguggcauu

SEQ ID NO: 2398 - RNA, 21 nt, Artificial Sequence
  source: /note="Description of Artificial Sequence: Synthetic oligonucleotide"
ugccacuguagaaaggcauuu

SEQ ID NO: 2399 - RNA, 21 nt, Artificial Sequence
  source: /note="Description of Artificial Sequence: Synthetic oligonucleotide"
ugccuuucuacaguggccuuu

SEQ ID NO: 2400 - RNA, 21 nt, Artificial Sequence
  source: /note="Description of Artificial Sequence: Synthetic oligonucleotide"
aggccacuguagaaaggcauu

SEQ ID NO: 2401 - RNA, 21 nt, Artificial Sequence
  source: /note="Description of Artificial Sequence: Synthetic oligonucleotide"
gccuuucuacaguggccuuuu

SEQ ID NO: 2402 - RNA, 21 nt, Artificial Sequence
  source: /note="Description of Artificial Sequence: Synthetic oligonucleotide"
aaggccacuguagaaaggcuu

SEQ ID NO: 2403 - RNA, 21 nt, Artificial Sequence
  source: /note="Description of Artificial Sequence: Synthetic oligonucleotide"
gguauguuccugcuucaucuu

SEQ ID NO: 2404 - RNA, 21 nt, Artificial Sequence
  source: /note="Description of Artificial Sequence: Synthetic oligonucleotide"
gaugaagcaggaacauaccuu

SEQ ID NO: 2405 - RNA, 21 nt, Artificial Sequence
  source: /note="Description of Artificial Sequence: Synthetic oligonucleotide"
guauguuccugcuucauccuu

SEQ ID NO: 2406 - RNA, 21 nt, Artificial Sequence
  source: /note="Description of Artificial Sequence: Synthetic oligonucleotide"
ggaugaagcaggaacauacuu

SEQ ID NO: 2407 - RNA, 21 nt, Artificial Sequence
  source: /note="Description of Artificial Sequence: Synthetic oligonucleotide"
uauguuccugcuucaucccuu

SEQ ID NO: 2408 - RNA, 21 nt, Artificial Sequence
  source: /note="Description of Artificial Sequence: Synthetic oligonucleotide"
gggaugaagcaggaacauauu

SEQ ID NO: 2409 - RNA, 21 nt, Artificial Sequence
  source: /note="Description of Artificial Sequence: Synthetic oligonucleotide"
auguuccugcuucauccccuu

SEQ ID NO: 2410 - RNA, 21 nt, Artificial Sequence
  source: /note="Description of Artificial Sequence: Synthetic oligonucleotide"
ggggaugaagcaggaacauuu

SEQ ID NO: 2411 - RNA, 21 nt, Artificial Sequence
  source: /note="Description of Artificial Sequence: Synthetic oligonucleotide"
uguuccugcuucauccccuuu

SEQ ID NO: 2412 - RNA, 21 nt, Artificial Sequence
  source: /note="Description of Artificial Sequence: Synthetic oligonucleotide"
aggggaugaagcaggaacauu

SEQ ID NO: 2413 - RNA, 21 nt, Artificial Sequence
  source: /note="Description of Artificial Sequence: Synthetic oligonucleotide"
guuccugcuucauccccuuuu

SEQ ID NO: 2414 - RNA, 21 nt, Artificial Sequence
  source: /note="Description of Artificial Sequence: Synthetic oligonucleotide"
aaggggaugaagcaggaacuu

SEQ ID NO: 2415 - RNA, 21 nt, Artificial Sequence
  source: /note="Description of Artificial Sequence: Synthetic oligonucleotide"
uuccugcuucauccccuucuu

SEQ ID NO: 2416 - RNA, 21 nt, Artificial Sequence
  source: /note="Description of Artificial Sequence: Synthetic oligonucleotide"
gaaggggaugaagcaggaauu

SEQ ID NO: 2417 - RNA, 21 nt, Artificial Sequence
  source: /note="Description of Artificial Sequence: Synthetic oligonucleotide"
uccugcuucauccccuucuuu

SEQ ID NO: 2418 - RNA, 21 nt, Artificial Sequence
  source: /note="Description of Artificial Sequence: Synthetic oligonucleotide"
agaaggggaugaagcaggauu

SEQ ID NO: 2419 - RNA, 21 nt, Artificial Sequence
  source: /note="Description of Artificial Sequence: Synthetic oligonucleotide"
ccugcuucauccccuucuauu

SEQ ID NO: 2420 - RNA, 21 nt, Artificial Sequence
  source: /note="Description of Artificial Sequence: Synthetic oligonucleotide"
uagaaggggaugaagcagguu

SEQ ID NO: 2421 - RNA, 21 nt, Artificial Sequence
  source: /note="Description of Artificial Sequence: Synthetic oligonucleotide"
cugcuucauccccuucuacuu

SEQ ID NO: 2422 - RNA, 21 nt, Artificial Sequence
  source: /note="Description of Artificial Sequence: Synthetic oligonucleotide"
guagaaggggaugaagcaguu

SEQ ID NO: 2423 - RNA, 21 nt, Artificial Sequence
  source: /note="Description of Artificial Sequence: Synthetic oligonucleotide"
ugcuucauccccuucuacauu

SEQ ID NO: 2424 - RNA, 21 nt, Artificial Sequence
  source: /note="Description of Artificial Sequence: Synthetic oligonucleotide"
uguagaaggggaugaagcauu

SEQ ID NO: 2425 - RNA, 21 nt, Artificial Sequence
  source: /note="Description of Artificial Sequence: Synthetic oligonucleotide"
gcuucauccccuucuacaguu

SEQ ID NO: 2426 - RNA, 21 nt, Artificial Sequence
  source: /note="Description of Artificial Sequence: Synthetic oligonucleotide"
cuguagaaggggaugaagcuu

SEQ ID NO: 2427 - RNA, 21 nt, Artificial Sequence
  source: /note="Description of Artificial Sequence: Synthetic oligonucleotide"
cuucauccccuucuacaguuu

SEQ ID NO: 2428 - RNA, 21 nt, Artificial Sequence
  source: /note="Description of Artificial Sequence: Synthetic oligonucleotide"
acuguagaaggggaugaaguu

SEQ ID NO: 2429 - RNA, 21 nt, Artificial Sequence
  source: /note="Description of Artificial Sequence: Synthetic oligonucleotide"
uucauccccuucuacaguguu

SEQ ID NO: 2430 - RNA, 21 nt, Artificial Sequence
  source: /note="Description of Artificial Sequence: Synthetic oligonucleotide"
cacuguagaaggggaugaauu

SEQ ID NO: 2431 - RNA, 21 nt, Artificial Sequence
  source: /note="Description of Artificial Sequence: Synthetic oligonucleotide"
ucauccccuucuacagugguu

SEQ ID NO: 2432 - RNA, 21 nt, Artificial Sequence
  source: /note="Description of Artificial Sequence: Synthetic oligonucleotide"
ccacuguagaaggggaugauu

SEQ ID NO: 2433 - RNA, 21 nt, Artificial Sequence
  source: /note="Description of Artificial Sequence: Synthetic oligonucleotide"
cauccccuucuacaguggcuu

SEQ ID NO: 2434 - RNA, 21 nt, Artificial Sequence
  source: /note="Description of Artificial Sequence: Synthetic oligonucleotide"
gccacuguagaaggggauguu

SEQ ID NO: 2435 - RNA, 21 nt, Artificial Sequence
  source: /note="Description of Artificial Sequence: Synthetic oligonucleotide"
auccccuucuacaguggccuu

SEQ ID NO: 2436 - RNA, 21 nt, Artificial Sequence
  source: /note="Description of Artificial Sequence: Synthetic oligonucleotide"
ggccacuguagaaggggauuu

SEQ ID NO: 2437 - RNA, 21 nt, Artificial Sequence
  source: /note="Description of Artificial Sequence: Synthetic oligonucleotide"
uccccuucuacaguggccuuu

SEQ ID NO: 2438 - RNA, 21 nt, Artificial Sequence
  source: /note="Description of Artificial Sequence: Synthetic oligonucleotide"
aggccacuguagaaggggauu

SEQ ID NO: 2439 - RNA, 21 nt, Artificial Sequence
  source: /note="Description of Artificial Sequence: Synthetic oligonucleotide"
ccccuucuacaguggccuuuu

SEQ ID NO: 2440 - RNA, 21 nt, Artificial Sequence
  source: /note="Description of Artificial Sequence: Synthetic oligonucleotide"
aaggccacuguagaagggguu
